United States Patent Application Publication US 2004/0241651 A1 - sequence listing, part 14

SEQ ID NO: 379782 - DNA, 12 bp, Artificial Sequence
  Oligonucleotide primer for the detection of SNP TSC0063463
taggtaatttta

SEQ ID NO: 379783 - DNA, 12 bp, Artificial Sequence
  Oligonucleotide primer for the detection of SNP TSC0063464
attcaacaccct

SEQ ID NO: 379784 - DNA, 12 bp, Artificial Sequence
  Oligonucleotide primer for the detection of SNP TSC0063467
tacaattcaact

SEQ ID NO: 379785 - DNA, 12 bp, Artificial Sequence
  Oligonucleotide primer for the detection of SNP TSC0063467
tacccatttcta

SEQ ID NO: 379786 - DNA, 12 bp, Artificial Sequence
  Oligonucleotide primer for the detection of SNP TSC0063467
tacccgtttcta

SEQ ID NO: 379787 - DNA, 12 bp, Artificial Sequence
  Oligonucleotide primer for the detection of SNP TSC0000806
aaaaaattcctc

SEQ ID NO: 379788 - DNA, 12 bp, Artificial Sequence
  Oligonucleotide primer for the detection of SNP TSC0000806
atgaaatgtaga

SEQ ID NO: 379789 - DNA, 12 bp, Artificial Sequence
  Oligonucleotide primer for the detection of SNP TSC0063469
aaacccctctct

SEQ ID NO: 379790 - DNA, 12 bp, Artificial Sequence
  Oligonucleotide primer for the detection of SNP TSC0063469
tatagaattagg

SEQ ID NO: 379791 - DNA, 12 bp, Artificial Sequence
  Oligonucleotide primer for the detection of SNP TSC0063470
tctctcaactat

SEQ ID NO: 379792 - DNA, 12 bp, Artificial Sequence
  Oligonucleotide primer for the detection of SNP TSC0063470
ggtgtttgttta

SEQ ID NO: 379793 - DNA, 12 bp, Artificial Sequence
  Oligonucleotide primer for the detection of SNP TSC0063470
ggtgttcgttta

SEQ ID NO: 379794 - DNA, 12 bp, Artificial Sequence
  Oligonucleotide primer for the detection of SNP TSC0063471
cactattaatta

SEQ ID NO: 379795 - DNA, 12 bp, Artificial Sequence
  Oligonucleotide primer for the detection of SNP TSC0001270
tctcaacccccc

SEQ ID NO: 379796 - DNA, 12 bp, Artificial Sequence
  Oligonucleotide primer for the detection of SNP TSC0007504
aaacaaaaacac

SEQ ID NO: 379797 - DNA, 12 bp, Artificial Sequence
  Oligonucleotide primer for the detection of SNP TSC0007504
tattttgtatag

SEQ ID NO: 379798 - DNA, 12 bp, Artificial Sequence
  Oligonucleotide primer for the detection of SNP TSC0007505
tgaaggataaaa

SEQ ID NO: 379799 - DNA, 12 bp, Artificial Sequence
  Oligonucleotide primer for the detection of SNP TSC0063472
tatattatataa

SEQ ID NO: 379800 - DNA, 12 bp, Artificial Sequence
  Oligonucleotide primer for the detection of SNP TSC0063472
taagatatattt

SEQ ID NO: 379801 - DNA, 12 bp, Artificial Sequence
  Oligonucleotide primer for the detection of SNP TSC0063472
tatattgtatga

SEQ ID NO: 379802 - DNA, 12 bp, Artificial Sequence
  Oligonucleotide primer for the detection of SNP TSC0000511
taaattagaaag

SEQ ID NO: 379803 - DNA, 12 bp, Artificial Sequence
  Oligonucleotide primer for the detection of SNP TSC0063475
aaaactaattta

SEQ ID NO: 379804 - DNA, 12 bp, Artificial Sequence
  Oligonucleotide primer for the detection of SNP TSC0063475
atagtggggaag

SEQ ID NO: 379805 - DNA, 12 bp, Artificial Sequence
  Oligonucleotide primer for the detection of SNP TSC0063475
gaattggtttgt

SEQ ID NO: 379806 - DNA, 12 bp, Artificial Sequence
  Oligonucleotide primer for the detection of SNP TSC0008930
caacacccactc

SEQ ID NO: 379807 - DNA, 12 bp, Artificial Sequence
  Oligonucleotide primer for the detection of SNP TSC0008930
taatttttgtta

SEQ ID NO: 379808 - DNA, 12 bp, Artificial Sequence
  Oligonucleotide primer for the detection of SNP TSC0063480
tattattcacct

SEQ ID NO: 379809 - DNA, 12 bp, Artificial Sequence
  Oligonucleotide primer for the detection of SNP TSC0063480
ggatttgggtta

SEQ ID NO: 379810 - DNA, 12 bp, Artificial Sequence
  Oligonucleotide primer for the detection of SNP TSC0063480
ggattcgggtta

SEQ ID NO: 379811 - DNA, 12 bp, Artificial Sequence
  Oligonucleotide primer for the detection of SNP TSC0063480
aaattcgaacta

SEQ ID NO: 379812 - DNA, 12 bp, Artificial Sequence
  Oligonucleotide primer for the detection of SNP TSC0008223
tcacctacaaac

SEQ ID NO: 379813 - DNA, 12 bp, Artificial Sequence
  Oligonucleotide primer for the detection of SNP TSC0008223
tcacctacgaac

SEQ ID NO: 379814 - DNA, 12 bp, Artificial Sequence
  Oligonucleotide primer for the detection of SNP TSC0008223
aaaaaattagag

SEQ ID NO: 379815 - DNA, 12 bp, Artificial Sequence
  Oligonucleotide primer for the detection of SNP TSC0008224
ccttacaaacac

SEQ ID NO: 379816 - DNA, 12 bp, Artificial Sequence
  Oligonucleotide primer for the detection of SNP TSC0008224
gttaggttttgg

SEQ ID NO: 379817 - DNA, 12 bp, Artificial Sequence
  Oligonucleotide primer for the detection of SNP TSC0063482
taaaccctaatc

SEQ ID NO: 379818 - DNA, 12 bp, Artificial Sequence
  Oligonucleotide primer for the detection of SNP TSC0063482
agtgtagttgag

SEQ ID NO: 379819 - DNA, 12 bp, Artificial Sequence
  Oligonucleotide primer for the detection of SNP TSC0063483
taacaacaacat

SEQ ID NO: 379820 - DNA, 12 bp, Artificial Sequence
  Oligonucleotide primer for the detection of SNP TSC0063483
taacaacgacat

SEQ ID NO: 379821 - DNA, 12 bp, Artificial Sequence
  Oligonucleotide primer for the detection of SNP TSC0063483
cgtttgtttttt

SEQ ID NO: 379822 - DNA, 12 bp, Artificial Sequence
  Oligonucleotide primer for the detection of SNP TSC0063483
acacttactctt

SEQ ID NO: 379823 - DNA, 12 bp, Artificial Sequence
  Oligonucleotide primer for the detection of SNP TSC0063483
acgcttactctt

SEQ ID NO: 379824 - DNA, 12 bp, Artificial Sequence
  Oligonucleotide primer for the detection of SNP TSC0063483
tagtagtggtat

SEQ ID NO: 379825 - DNA, 12 bp, Artificial Sequence
  Oligonucleotide primer for the detection of SNP TSC0063483
tagtagcggtat

SEQ ID NO: 379826 - DNA, 12 bp, Artificial Sequence
  Oligonucleotide primer for the detection of SNP TSC0063485
tattttaatact

SEQ ID NO: 379827 - DNA, 12 bp, Artificial Sequence
  Oligonucleotide primer for the detection of SNP TSC0063485
tatttaatagaa

SEQ ID NO: 379828 - DNA, 12 bp, Artificial Sequence
  Oligonucleotide primer for the detection of SNP TSC0063486
tatagttgttat

SEQ ID NO: 379829 - DNA, 12 bp, Artificial Sequence
  Oligonucleotide primer for the detection of SNP TSC0063486
tacaattactac

SEQ ID NO: 379830 - DNA, 12 bp, Artificial Sequence
  Oligonucleotide primer for the detection of SNP TSC0063486
tttaaaaagagg

SEQ ID NO: 379831 - DNA, 12 bp, Artificial Sequence
  Oligonucleotide primer for the detection of SNP TSC0000871
acaatttaacta

SEQ ID NO: 379832 - DNA, 12 bp, Artificial Sequence
  Oligonucleotide primer for the detection of SNP TSC0000871
tatagtttggtt

SEQ ID NO: 379833 - DNA, 12 bp, Artificial Sequence
  Oligonucleotide primer for the detection of SNP TSC0001357
tcctacataaaa

SEQ ID NO: 379834 - DNA, 12 bp, Artificial Sequence
  Oligonucleotide primer for the detection of SNP TSC0001357
tcctacgtaaaa

SEQ ID NO: 379835 - DNA, 12 bp, Artificial Sequence
  Oligonucleotide primer for the detection of SNP TSC0001357
gtttgttagatt

SEQ ID NO: 379836 - DNA, 12 bp, Artificial Sequence
  Oligonucleotide primer for the detection of SNP TSC0001357
aacctattaaac

SEQ ID NO: 379837 - DNA, 12 bp, Artificial Sequence
  Oligonucleotide primer for the detection of SNP TSC0001357
ttagttttacgt

SEQ ID NO: 379838 - DNA, 12 bp, Artificial Sequence
  Oligonucleotide primer for the detection of SNP TSC0063493
atctctaaaacc

SEQ ID NO: 379839 - DNA, 12 bp, Artificial Sequence
  Oligonucleotide primer for the detection of SNP TSC0000615
taattttaaagt

SEQ ID NO: 379840 - DNA, 12 bp, Artificial Sequence
  Oligonucleotide primer for the detection of SNP TSC0000615
aaatgtggaagt

SEQ ID NO: 379841 - DNA, 12 bp, Artificial Sequence
  Oligonucleotide primer for the detection of SNP TSC0000616
caatttcaaata

SEQ ID NO: 379842 - DNA, 12 bp, Artificial Sequence
  Oligonucleotide primer for the detection of SNP TSC0000616
tcacacttctat

SEQ ID NO: 379843 - DNA, 12 bp, Artificial Sequence
  Oligonucleotide primer for the detection of SNP TSC0000616
tagttttagata

SEQ ID NO: 379844 - DNA, 12 bp, Artificial Sequence
  Oligonucleotide primer for the detection of SNP TSC0000617
aatgaatgggaa

SEQ ID NO: 379845 - DNA, 12 bp, Artificial Sequence
  Oligonucleotide primer for the detection of SNP TSC0000617
aaagtgtgtagt

SEQ ID NO: 379846 - DNA, 12 bp, Artificial Sequence
  Oligonucleotide primer for the detection of SNP TSC0063494
cttccccttcac

SEQ ID NO: 379847 - DNA, 12 bp, Artificial Sequence
  Oligonucleotide primer for the detection of SNP TSC0063495
ttcatctatata

SEQ ID NO: 379848 - DNA, 12 bp, Artificial Sequence
  Oligonucleotide primer for the detection of SNP TSC0063495
agattatgtatt

SEQ ID NO: 379849 - DNA, 12 bp, Artificial Sequence
  Oligonucleotide primer for the detection of SNP TSC0063495
ataaactataca

SEQ ID NO: 379850 - DNA, 12 bp, Artificial Sequence
  Oligonucleotide primer for the detection of SNP TSC0063496
gtatttaaaaaa

SEQ ID NO: 379851 - DNA, 12 bp, Artificial Sequence
  Oligonucleotide primer for the detection of SNP TSC0063496
atatccaaaaaa

SEQ ID NO: 379852 - DNA, 12 bp, Artificial Sequence
  Oligonucleotide primer for the detection of SNP TSC0063498
gttaaggttttt

SEQ ID NO: 379853 - DNA, 12 bp, Artificial Sequence
  Oligonucleotide primer for the detection of SNP TSC0063498
atcaaaactcct

SEQ ID NO: 379854 - DNA, 12 bp, Artificial Sequence
  Oligonucleotide primer for the detection of SNP TSC0063498
tttgtaagggtt

SEQ ID NO: 379855 - DNA, 12 bp, Artificial Sequence
  Oligonucleotide primer for the detection of SNP TSC0063499
aatttccaaaat

SEQ ID NO: 379856 - DNA, 12 bp, Artificial Sequence
  Oligonucleotide primer for the detection of SNP TSC0063499
ttagtatgatgg

SEQ ID NO: 379857 - DNA, 12 bp, Artificial Sequence
  Oligonucleotide primer for the detection of SNP TSC0010319
aatcacaaccct

SEQ ID NO: 379858 - DNA, 12 bp, Artificial Sequence
  Oligonucleotide primer for the detection of SNP TSC0010319
tggtttgtgtgg

SEQ ID NO: 379859 - DNA, 12 bp, Artificial Sequence
  Oligonucleotide primer for the detection of SNP TSC0010319
tggtttgtgcgg

SEQ ID NO: 379860 - DNA, 12 bp, Artificial Sequence
  Oligonucleotide primer for the detection of SNP TSC0010319
taacctatacga

SEQ ID NO: 379861 - DNA, 12 bp, Artificial Sequence
  Oligonucleotide primer for the detection of SNP TSC0010319
agttatagtttt

SEQ ID NO: 379862 - DNA, 12 bp, Artificial Sequence
  Oligonucleotide primer for the detection of SNP TSC0010320
taactaactata

SEQ ID NO: 379863 - DNA, 12 bp, Artificial Sequence
  Oligonucleotide primer for the detection of SNP TSC0010320
atctatcccaaa

SEQ ID NO: 379864 - DNA, 12 bp, Artificial Sequence
  Oligonucleotide primer for the detection of SNP TSC0010320
tgattagttgtg

SEQ ID NO: 379865 - DNA, 12 bp, Artificial Sequence
  Oligonucleotide primer for the detection of SNP TSC0063504
aattgttaagtt

SEQ ID NO: 379866 - DNA, 12 bp, Artificial Sequence
  Oligonucleotide primer for the detection of SNP TSC0063504
taaactaccaaa

SEQ ID NO: 379867 - DNA, 12 bp, Artificial Sequence
  Oligonucleotide primer for the detection of SNP TSC0009746
aatattttcctt

SEQ ID NO: 379868 - DNA, 12 bp, Artificial Sequence
  Oligonucleotide primer for the detection of SNP TSC0009746
agttaagaagta

SEQ ID NO: 379869 - DNA, 12 bp, Artificial Sequence
  Oligonucleotide primer for the detection of SNP TSC0010082
taacttaaaacc

SEQ ID NO: 379870 - DNA, 12 bp, Artificial Sequence
  Oligonucleotide primer for the detection of SNP TSC0010082
aaagggtataaa

SEQ ID NO: 379871 - DNA, 12 bp, Artificial Sequence
  Oligonucleotide primer for the detection of SNP TSC0063505
tgtttaaggatt

SEQ ID NO: 379872 - DNA, 12 bp, Artificial Sequence
  Oligonucleotide primer for the detection of SNP TSC0063505
cgtttaaggatt

SEQ ID NO: 379873 - DNA, 12 bp, Artificial Sequence
  Oligonucleotide primer for the detection of SNP TSC0063505
tgtttaaggatc

SEQ ID NO: 379874 - DNA, 12 bp, Artificial Sequence
  Oligonucleotide primer for the detection of SNP TSC0063505
cgtttaaggatc

SEQ ID NO: 379875 - DNA, 12 bp, Artificial Sequence
  Oligonucleotide primer for the detection of SNP TSC0063505
catttaaaaatc

SEQ ID NO: 379876 - DNA, 12 bp, Artificial Sequence
  Oligonucleotide primer for the detection of SNP TSC0063505
cgtttaaaaatc

SEQ ID NO: 379877 - DNA, 12 bp, Artificial Sequence
  Oligonucleotide primer for the detection of SNP TSC0063505
ttaataggaggg

SEQ ID NO: 379878 - DNA, 12 bp, Artificial Sequence
  Oligonucleotide primer for the detection of SNP TSC0000746
cctcttcatacc

SEQ ID NO: 379879 - DNA, 12 bp, Artificial Sequence
  Oligonucleotide primer for the detection of SNP TSC0000746
tttagattgaat

SEQ ID NO: 379880 - DNA, 12 bp, Artificial Sequence
  Oligonucleotide primer for the detection of SNP TSC0000746
tttagattgaac

SEQ ID NO: 379881 - DNA, 12 bp, Artificial Sequence
  Oligonucleotide primer for the detection of SNP TSC0063507
actaaatacact

SEQ ID NO: 379882 - DNA, 12 bp, Artificial Sequence
  Oligonucleotide primer for the detection of SNP TSC0063508
aaagaaattgaa

SEQ ID NO: 379883 - DNA, 12 bp, Artificial Sequence
  Oligonucleotide primer for the detection of SNP TSC0063509
acacccttttct

SEQ ID NO: 379884 - DNA, 12 bp, Artificial Sequence
  Oligonucleotide primer for the detection of SNP TSC0063509
acgcccttttct

SEQ ID NO: 379885 - DNA, 12 bp, Artificial Sequence
  Oligonucleotide primer for the detection of SNP TSC0063509
gataggatgata

SEQ ID NO: 379886 - DNA, 12 bp, Artificial Sequence
  Oligonucleotide primer for the detection of SNP TSC0063510
ccatttataaaa

SEQ ID NO: 379887 - DNA, 12 bp, Artificial Sequence
  Oligonucleotide primer for the detection of SNP TSC0063512
tcttcataatca

SEQ ID NO: 379888 - DNA, 12 bp, Artificial Sequence
  Oligonucleotide primer for the detection of SNP TSC0063513
aacctcaatcaa

SEQ ID NO: 379889 - DNA, 12 bp, Artificial Sequence
  Oligonucleotide primer for the detection of SNP TSC0063513
gtattattattt

SEQ ID NO: 379890 - DNA, 12 bp, Artificial Sequence
  Oligonucleotide primer for the detection of SNP TSC0063513
cactaccactta

SEQ ID NO: 379891 - DNA, 12 bp, Artificial Sequence
  Oligonucleotide primer for the detection of SNP TSC0063513
tagttttaatta

SEQ ID NO: 379892 - DNA, 12 bp, Artificial Sequence
  Oligonucleotide primer for the detection of SNP TSC0063514
acaaaacccccc

SEQ ID NO: 379893 - DNA, 12 bp, Artificial Sequence
  Oligonucleotide primer for the detection of SNP TSC0063514
ggttgagtttgg

SEQ ID NO: 379894 - DNA, 12 bp, Artificial Sequence
  Oligonucleotide primer for the detection of SNP TSC0063514
gtaaagtttttt

SEQ ID NO: 379895 - DNA, 12 bp, Artificial Sequence
  Oligonucleotide primer for the detection of SNP TSC0063514
gtaaagtttttc

SEQ ID NO: 379896 - DNA, 12 bp, Artificial Sequence
  Oligonucleotide primer for the detection of SNP TSC0063517
ttaatatatact

SEQ ID NO: 379897 - DNA, 12 bp, Artificial Sequence
  Oligonucleotide primer for the detection of SNP TSC0005682
taaatttgatta

SEQ ID NO: 379898 - DNA, 12 bp, Artificial Sequence
  Oligonucleotide primer for the detection of SNP TSC0005683
tccttcattaat

SEQ ID NO: 379899 - DNA, 12 bp, Artificial Sequence
  Oligonucleotide primer for the detection of SNP TSC0005683
atgtgaaaagtt

SEQ ID NO: 379900 - DNA, 12 bp, Artificial Sequence
  Oligonucleotide primer for the detection of SNP TSC0000622
gtagggaagttt

SEQ ID NO: 379901 - DNA, 12 bp, Artificial Sequence
  Oligonucleotide primer for the detection of SNP TSC0000622
aggggaagaagt

SEQ ID NO: 379902 - DNA, 12 bp, Artificial Sequence
  Oligonucleotide primer for the detection of SNP TSC0000624
cacttacccctt

SEQ ID NO: 379903 - DNA, 12 bp, Artificial Sequence
  Oligonucleotide primer for the detection of SNP TSC0000624
cgcttacccctt

SEQ ID NO: 379904 - DNA, 12 bp, Artificial Sequence
  Oligonucleotide primer for the detection of SNP TSC0000624
ttgtttattgga

SEQ ID NO: 379905 - DNA, 12 bp, Artificial Sequence
  Oligonucleotide primer for the detection of SNP TSC0063518
tttttcaaatac

SEQ ID NO: 379906 - DNA, 12 bp, Artificial Sequence
  Oligonucleotide primer for the detection of SNP TSC0063518
agaagtggtaat

SEQ ID NO: 379907 - DNA, 12 bp, Artificial Sequence
  Oligonucleotide primer for the detection of SNP TSC0063518
agaagcggtaat

SEQ ID NO: 379908 - DNA, 12 bp, Artificial Sequence
  Oligonucleotide primer for the detection of SNP TSC0063518
aaaaacgacaat

SEQ ID NO: 379909 - DNA, 12 bp, Artificial Sequence
  Oligonucleotide primer for the detection of SNP TSC0063521
tataatctaaca

SEQ ID NO: 379910 - DNA, 12 bp, Artificial Sequence
  Oligonucleotide primer for the detection of SNP TSC0063521
acaaactataac

SEQ ID NO: 379911 - DNA, 12 bp, Artificial Sequence
  Oligonucleotide primer for the detection of SNP TSC0063521
atatgatttaat

SEQ ID NO: 379912 - DNA, 12 bp, Artificial Sequence
  Oligonucleotide primer for the detection of SNP TSC0000572
ttatcaaaaatc

SEQ ID NO: 379913 - DNA, 12 bp, Artificial Sequence
  Oligonucleotide primer for the detection of SNP TSC0000573
cggaaaaaaaaa

SEQ ID NO: 379914 - DNA, 12 bp, Artificial Sequence
  Oligonucleotide primer for the detection of SNP TSC0000573
aagagttgaggg

SEQ ID NO: 379915 - DNA, 12 bp, Artificial Sequence
  Oligonucleotide primer for the detection of SNP TSC0063522
actttattaaac

SEQ ID NO: 379916 - DNA, 12 bp, Artificial Sequence
  Oligonucleotide primer for the detection of SNP TSC0063523
aaaatcccttta

SEQ ID NO: 379917 - DNA, 12 bp, Artificial Sequence
  Oligonucleotide primer for the detection of SNP TSC0063523
attagtgttgtt

SEQ ID NO: 379918 - DNA, 12 bp, Artificial Sequence
  Oligonucleotide primer for the detection of SNP TSC0063523
aaattaatacta

SEQ ID NO: 379919 - DNA, 12 bp, Artificial Sequence
  Oligonucleotide primer for the detection of SNP TSC0063524
ccccactaaaaa

SEQ ID NO: 379920 - DNA, 12 bp, Artificial Sequence
  Oligonucleotide primer for the detection of SNP TSC0063524
ccccgctaaaaa

SEQ ID NO: 379921 - DNA, 12 bp, Artificial Sequence
  Oligonucleotide primer for the detection of SNP TSC0063524
agttggggggtt

SEQ ID NO: 379922 - DNA, 12 bp, Artificial Sequence
  Oligonucleotide primer for the detection of SNP TSC0063527
atattagtaatt

SEQ ID NO: 379923 - DNA, 12 bp, Artificial Sequence
  Oligonucleotide primer for the detection of SNP TSC0063527
aatatcaacaat

SEQ ID NO: 379924 - DNA, 12 bp, Artificial Sequence
  Oligonucleotide primer for the detection of SNP TSC0063527
gttgttgaattt

SEQ ID NO: 379925 - DNA, 12 bp, Artificial Sequence
  Oligonucleotide primer for the detection of SNP TSC0063533
gagataattaaa

SEQ ID NO: 379926 - DNA, 12 bp, Artificial Sequence
  Oligonucleotide primer for the detection of SNP TSC0063533
aaaacaaccaaa

SEQ ID NO: 379927 - DNA, 12 bp, Artificial Sequence
  Oligonucleotide primer for the detection of SNP TSC0063534
ttcattatataa

SEQ ID NO: 379928 - DNA, 12 bp, Artificial Sequence
  Oligonucleotide primer for the detection of SNP TSC0063534
ttgaaagatgtg

SEQ ID NO: 379929 - DNA, 12 bp, Artificial Sequence
  Oligonucleotide primer for the detection of SNP TSC0063538
ccaaatactact

SEQ ID NO: 379930 - DNA, 12 bp, Artificial Sequence
  Oligonucleotide primer for the detection of SNP TSC0063539
ttaattaataag

SEQ ID NO: 379931 - DNA, 12 bp, Artificial Sequence
  Oligonucleotide primer for the detection of SNP TSC0063540
gaaggttaaaga

SEQ ID NO: 379932 - DNA, 12 bp, Artificial Sequence
  Oligonucleotide primer for the detection of SNP TSC0063544
gttggtatttga

SEQ ID NO: 379933 - DNA, 12 bp, Artificial Sequence
  Oligonucleotide primer for the detection of SNP TSC0063544
attaacacttaa

SEQ ID NO: 379934 - DNA, 12 bp, Artificial Sequence
  Oligonucleotide primer for the detection of SNP TSC0063544
gaggaatagggt

SEQ ID NO: 379935 - DNA, 12 bp, Artificial Sequence
  Oligonucleotide primer for the detection of SNP TSC0063545
cttttctcttct

SEQ ID NO: 379936 - DNA, 12 bp, Artificial Sequence
  Oligonucleotide primer for the detection of SNP TSC0063545
tatttttaggga

SEQ ID NO: 379937 - DNA, 12 bp, Artificial Sequence
  Oligonucleotide primer for the detection of SNP TSC0063546
accccttcctct

SEQ ID NO: 379938 - DNA, 12 bp, Artificial Sequence
  Oligonucleotide primer for the detection of SNP TSC0063546
tatggtgataaa

SEQ ID NO: 379939 - DNA, 12 bp, Artificial Sequence
  Oligonucleotide primer for the detection of SNP TSC0063546
tatggcgataaa

SEQ ID NO: 379940 - DNA, 12 bp, Artificial Sequence
  Oligonucleotide primer for the detection of SNP TSC0063546
cataacaataaa

SEQ ID NO: 379941 - DNA, 12 bp, Artificial Sequence
  Oligonucleotide primer for the detection of SNP TSC0063546
cataacgataaa

SEQ ID NO: 379942 - DNA, 12 bp, Artificial Sequence
  Oligonucleotide primer for the detection of SNP TSC0063547
tgtgagaaagtt

SEQ ID NO: 379943 - DNA, 12 bp, Artificial Sequence
  Oligonucleotide primer for the detection of SNP TSC0063547
ttgagttgaagt

SEQ ID NO: 379944 - DNA, 12 bp, Artificial Sequence
  Oligonucleotide primer for the detection of SNP TSC0063548
atccttcaaata

SEQ ID NO: 379945 - DNA, 12 bp, Artificial Sequence
  Oligonucleotide primer for the detection of SNP TSC0063548
ttaaagggaaat

SEQ ID NO: 379946 - DNA, 12 bp, Artificial Sequence
  Oligonucleotide primer for the detection of SNP TSC0063549
tcctttttactt

SEQ ID NO: 379947 - DNA, 12 bp, Artificial Sequence
  Oligonucleotide primer for the detection of SNP TSC0063549
taaagggttggg

SEQ ID NO: 379948 - DNA, 12 bp, Artificial Sequence
  Oligonucleotide primer for the detection of SNP TSC0063550
gtttttttgtgt

SEQ ID NO: 379949 - DNA, 12 bp, Artificial Sequence
  Oligonucleotide primer for the detection of SNP TSC0063550
gtttttttgcgt

SEQ ID NO: 379950 - DNA, 12 bp, Artificial Sequence
  Oligonucleotide primer for the detection of SNP TSC0063550
atctctctacat

SEQ ID NO: 379951 - DNA, 12 bp, Artificial Sequence
  Oligonucleotide primer for the detection of SNP TSC0063550
atctctctacgt

SEQ ID NO: 379952 - DNA, 12 bp, Artificial Sequence
  Oligonucleotide primer for the detection of SNP TSC0063550
tgaaggttatag

SEQ ID NO: 379953 - DNA, 12 bp, Artificial Sequence
  Oligonucleotide primer for the detection of SNP TSC0063551
ttttcaatttaa

SEQ ID NO: 379954 - DNA, 12 bp, Artificial Sequence
  Oligonucleotide primer for the detection of SNP TSC0063551
ttttcgatttaa

SEQ ID NO: 379955 - DNA, 12 bp, Artificial Sequence
  Oligonucleotide primer for the detection of SNP TSC0063551
gtataatgtgtt

SEQ ID NO: 379956 - DNA, 12 bp, Artificial Sequence
  Oligonucleotide primer for the detection of SNP TSC0063551
acacaatatact

SEQ ID NO: 379957 - DNA, 12 bp, Artificial Sequence
  Oligonucleotide primer for the detection of SNP TSC0063551
ttttcggtttgg

SEQ ID NO: 379958 - DNA, 12 bp, Artificial Sequence
  Oligonucleotide primer for the detection of SNP TSC0063552
ttctcactataa

SEQ ID NO: 379959 - DNA, 12 bp, Artificial Sequence
  Oligonucleotide primer for the detection of SNP TSC0063552
attatatctaat

SEQ ID NO: 379960 - DNA, 12 bp, Artificial Sequence
  Oligonucleotide primer for the detection of SNP TSC0063553
acacaacaaata

SEQ ID NO: 379961 - DNA, 12 bp, Artificial Sequence
  Oligonucleotide primer for the detection of SNP TSC0063553
taacctactccc

SEQ ID NO: 379962 - DNA, 12 bp, Artificial Sequence
  Oligonucleotide primer for the detection of SNP TSC0063554
caaccaacaacc

SEQ ID NO: 379963 - DNA, 12 bp, Artificial Sequence
  Oligonucleotide primer for the detection of SNP TSC0063554
agatttgtagaa

SEQ ID NO: 379964 - DNA, 12 bp, Artificial Sequence
  Oligonucleotide primer for the detection of SNP TSC0063555
ttaatccaaata

SEQ ID NO: 379965 - DNA, 12 bp, Artificial Sequence
  Oligonucleotide primer for the detection of SNP TSC0063555
tattgagatttt

SEQ ID NO: 379966 - DNA, 12 bp, Artificial Sequence
  Oligonucleotide primer for the detection of SNP TSC0063556
taaaaatcactt

SEQ ID NO: 379967 - DNA, 12 bp, Artificial Sequence
  Oligonucleotide primer for the detection of SNP TSC0063562
aggatgattggt

SEQ ID NO: 379968 - DNA, 12 bp, Artificial Sequence
  Oligonucleotide primer for the detection of SNP TSC0063562
taagaaaatttt

SEQ ID NO: 379969 - DNA, 12 bp, Artificial Sequence
  Oligonucleotide primer for the detection of SNP TSC0063563
aataaaatctta

SEQ ID NO: 379970 - DNA, 12 bp, Artificial Sequence
  Oligonucleotide primer for the detection of SNP TSC0063563
attctcttacta

SEQ ID NO: 379971 - DNA, 12 bp, Artificial Sequence
  Oligonucleotide primer for the detection of SNP TSC0063565
aacttctcaaat

SEQ ID NO: 379972 - DNA, 12 bp, Artificial Sequence
  Oligonucleotide primer for the detection of SNP TSC0063565
ttaactactaaa

SEQ ID NO: 379973 - DNA, 12 bp, Artificial Sequence
  Oligonucleotide primer for the detection of SNP TSC0063565
gattttttaaat

SEQ ID NO: 379974 - DNA, 12 bp, Artificial Sequence
  Oligonucleotide primer for the detection of SNP TSC0063566
cttattaaatac

SEQ ID NO: 379975 - DNA, 12 bp, Artificial Sequence
  Oligonucleotide primer for the detection of SNP TSC0063566
tggagtgaattg

SEQ ID NO: 379976 - DNA, 12 bp, Artificial Sequence
  Oligonucleotide primer for the detection of SNP TSC0063568
tatcttaaaaat

SEQ ID NO: 379977 - DNA, 12 bp, Artificial Sequence
  Oligonucleotide primer for the detection of SNP TSC0063568
tttctataacca

SEQ ID NO: 379978 - DNA, 12 bp, Artificial Sequence
  Oligonucleotide primer for the detection of SNP TSC0063568
tattttggaaat

SEQ ID NO: 379979 - DNA, 12 bp, Artificial Sequence
  Oligonucleotide primer for the detection of SNP TSC0063569
gtaatgtggtat

SEQ ID NO: 379980 - DNA, 12 bp, Artificial Sequence
  Oligonucleotide primer for the detection of SNP TSC0063569
ataatataatac

SEQ ID NO: 379981 - DNA, 12 bp, Artificial Sequence
  Oligonucleotide primer for the detection of SNP TSC0063571
aaaaacaacttc

SEQ ID NO: 379982 - DNA, 12 bp, Artificial Sequence
  Oligonucleotide primer for the detection of SNP TSC0063571
aaaaacgacttc

SEQ ID NO: 379983 - DNA, 12 bp, Artificial Sequence
  Oligonucleotide primer for the detection of SNP TSC0063572
acttctaaatct

SEQ ID NO: 379984 - DNA, 12 bp, Artificial Sequence
  Oligonucleotide primer for the detection of SNP TSC0063572
aagaaaggatta

SEQ ID NO: 379985 - DNA, 12 bp, Artificial Sequence
  Oligonucleotide primer for the detection of SNP TSC0063575
atgatttttttg

SEQ ID NO: 379986 - DNA, 12 bp, Artificial Sequence
  Oligonucleotide primer for the detection of SNP TSC0063575
attagagaaaat

SEQ ID NO: 379987 - DNA, 12 bp, Artificial Sequence
  Oligonucleotide primer for the detection of SNP TSC0005081
aaattctatttt

SEQ ID NO: 379988 - DNA, 12 bp, Artificial Sequence
  Oligonucleotide primer for the detection of SNP TSC0005081
tagtttattaaa

SEQ ID NO: 379989 - DNA, 12 bp, Artificial Sequence
  Oligonucleotide primer for the detection of SNP TSC0063580
acctttaaaaat

SEQ ID NO: 379990 - DNA, 12 bp, Artificial Sequence
  Oligonucleotide primer for the detection of SNP TSC0063580
aaaagagataag

SEQ ID NO: 379991 - DNA, 12 bp, Artificial Sequence
  Oligonucleotide primer for the detection of SNP TSC0063582
tatataattacc

SEQ ID NO: 379992 - DNA, 12 bp, Artificial Sequence
  Oligonucleotide primer for the detection of SNP TSC0063582
taggtttgatta

SEQ ID NO: 379993 - DNA, 12 bp, Artificial Sequence
  Oligonucleotide primer for the detection of SNP TSC0063583
aataactcaaat

SEQ ID NO: 379994 - DNA, 12 bp, Artificial Sequence
  Oligonucleotide primer for the detection of SNP TSC0063583
gttattagatag

SEQ ID NO: 379995 - DNA, 12 bp, Artificial Sequence
  Oligonucleotide primer for the detection of SNP TSC0063584
aaaaggttagga

SEQ ID NO: 379996 - DNA, 12 bp, Artificial Sequence
  Oligonucleotide primer for the detection of SNP TSC0009090
cccttctaccaa

SEQ ID NO: 379997 - DNA, 12 bp, Artificial Sequence
  Oligonucleotide primer for the detection of SNP TSC0009090
gataatagataa

SEQ ID NO: 379998 - DNA, 12 bp, Artificial Sequence
  Oligonucleotide primer for the detection of SNP TSC0009090
aacaacaaacaa

SEQ ID NO: 379999 - DNA, 12 bp, Artificial Sequence
  Oligonucleotide primer for the detection of SNP TSC0009091
ttctatataaca

SEQ ID NO: 380000 - DNA, 12 bp, Artificial Sequence
  Oligonucleotide primer for the detection of SNP TSC0009091
ggagaaggattg

SEQ ID NO: 380001 - DNA, 12 bp, Artificial Sequence
  Oligonucleotide primer for the detection of SNP TSC0063585
tcaacatttctt

SEQ ID NO: 380002 - DNA, 12 bp, Artificial Sequence
  Oligonucleotide primer for the detection of SNP TSC0063585
tcaacgtttctt

SEQ ID NO: 380003 - DNA, 12 bp, Artificial Sequence
  Oligonucleotide primer for the detection of SNP TSC0063588
ggttgtagattt

SEQ ID NO: 380004 - DNA, 12 bp, Artificial Sequence
  Oligonucleotide primer for the detection of SNP TSC0063588
aactacaaaccc

SEQ ID NO: 380005 - DNA, 12 bp, Artificial Sequence
  Oligonucleotide primer for the detection of SNP TSC0063588
gagtaggaggtt

SEQ ID NO: 380006 - DNA, 12 bp, Artificial Sequence
  Oligonucleotide primer for the detection of SNP TSC0063588
gagtaggaggtc

SEQ ID NO: 380007 - DNA, 12 bp, Artificial Sequence
  Oligonucleotide primer for the detection of SNP TSC0063589
agagtaagaaat

SEQ ID NO: 380008 - DNA, 12 bp, Artificial Sequence
  Oligonucleotide primer for the detection of SNP TSC0063589
agagtaagaaac

SEQ ID NO: 380009 - DNA, 12 bp, Artificial Sequence
  Oligonucleotide primer for the detection of SNP TSC0063595
tacaactctaca

SEQ ID NO: 380010 - DNA, 12 bp, Artificial Sequence
  Oligonucleotide primer for the detection of SNP TSC0063595
tacaactctacg

SEQ ID NO: 380011 - DNA, 12 bp, Artificial Sequence
  Oligonucleotide primer for the detection of SNP TSC0063595
acctttccaaca

SEQ ID NO: 380012 - DNA, 12 bp, Artificial Sequence
  Oligonukleotid-Primer
atgtaattttgt

SEQ ID NO: 380013 - DNA, 12 bp, Artificial Sequence
  Oligonucleotide primer for the detection of SNP TSC0063595
atgtaattttgc

SEQ ID NO: 380014 - DNA, 12 bp, Artificial Sequence
  Oligonucleotide primer for the detection of SNP TSC0063596
atagatattgag

SEQ ID NO: 380015 - DNA, 12 bp, Artificial Sequence
  Oligonucleotide primer for the detection of SNP TSC0063596
atagggaataat

SEQ ID NO: 380016 - DNA, 12 bp, Artificial Sequence
  Oligonukleotid-Primer
aatcctccctaa

SEQ ID NO: 380017 - DNA, 12 bp, Artificial Sequence
  Oligonucleotide primer for the detection of SNP TSC0063597
gaagaaatttgt

SEQ ID NO: 380018 - DNA, 12 bp, Artificial Sequence
  Oligonucleotide primer for the detection of SNP TSC0063598
ctaaaataattt

SEQ ID NO: 380019 - DNA, 12 bp, Artificial Sequence
  Oligonucleotide primer for the detection of SNP TSC0063598
aagaatagaata

SEQ ID NO: 380020 - DNA, 12 bp, Artificial Sequence
  Oligonucleotide primer for the detection of SNP TSC0063598
ttgaaataattt

SEQ ID NO: 380021 - DNA, 12 bp, Artificial Sequence
  Oligonucleotide primer for the detection of SNP TSC0063599
acaaacaattca

SEQ ID NO: 380022 - DNA, 12 bp, Artificial Sequence
  Oligonucleotide primer for the detection of SNP TSC0063599
atattggatatt

SEQ ID NO: 380023 - DNA, 12 bp, Artificial Sequence
  Oligonucleotide primer for the detection of SNP TSC0063599
atattggatatc

SEQ ID NO: 380024 - DNA, 12 bp, Artificial Sequence
  Oligonucleotide primer for the detection of SNP TSC0063599
atagataattta

SEQ ID NO: 380025 - DNA, 12 bp, Artificial Sequence
  Oligonucleotide primer for the detection of SNP TSC0063600
accttctctttt

SEQ ID NO: 380026 - DNA, 12 bp, Artificial Sequence
  Oligonucleotide primer for the detection of SNP TSC0063601
atcccctaatat

SEQ ID NO: 380027 - DNA, 12 bp, Artificial Sequence
  Oligonucleotide primer for the detection of SNP TSC0063601
aattggtttatg

SEQ ID NO: 380028 - DNA, 12 bp, Artificial Sequence
  Oligonucleotide primer for the detection of SNP TSC0009838
caatatttacaa

SEQ ID NO: 380029 - DNA, 12 bp, Artificial Sequence
  Oligonucleotide primer for the detection of SNP TSC0009838
tagtagtaagat

SEQ ID NO: 380030 - DNA, 12 bp, Artificial Sequence
  Oligonucleotide primer for the detection of SNP TSC0009838
caacaacaaaat

SEQ ID NO: 380031 - DNA, 12 bp, Artificial Sequence
  Oligonucleotide primer for the detection of SNP TSC0009838
tagtgtttgtaa

SEQ ID NO: 380032 - DNA, 12 bp, Artificial Sequence
  Oligonucleotide primer for the detection of SNP TSC0005158
atatactaattt

SEQ ID NO: 380033 - DNA, 12 bp, Artificial Sequence
  Oligonucleotide primer for the detection of SNP TSC0005158
gtataataatat

SEQ ID NO: 380034 - DNA, 12 bp, Artificial Sequence
  Oligonucleotide primer for the detection of SNP TSC0005159
cattaattattt

SEQ ID NO: 380035 - DNA, 12 bp, Artificial Sequence
  Oligonucleotide primer for the detection of SNP TSC0005160
cctttacaatct

SEQ ID NO: 380036 - DNA, 12 bp, Artificial Sequence
  Oligonucleotide primer for the detection of SNP TSC0005160
cctttacgatct

SEQ ID NO: 380037 - DNA, 12 bp, Artificial Sequence
  Oligonucleotide primer for the detection of SNP TSC0005160
gtttattttaag

SEQ ID NO: 380038 - DNA, 12 bp, Artificial Sequence
  Oligonucleotide primer for the detection of SNP TSC0004586
taacacaatctc

SEQ ID NO: 380039 - DNA, 12 bp, Artificial Sequence
  Oligonucleotide primer for the detection of SNP TSC0004586
tttggtaatgga

SEQ ID NO: 380040 - DNA, 12 bp, Artificial Sequence
  Oligonucleotide primer for the detection of SNP TSC0004586
ttcggtaatgga

SEQ ID NO: 380041 - DNA, 12 bp, Artificial Sequence
  Oligonucleotide primer for the detection of SNP TSC0004586
tttggtaacgga

SEQ ID NO: 380042 - DNA, 12 bp, Artificial Sequence
  Oligonucleotide primer for the detection of SNP TSC0004586
ttcggtaacgga

SEQ ID NO: 380043 - DNA, 12 bp, Artificial Sequence
  Oligonucleotide primer for the detection of SNP TSC0004587
aatacattccta

SEQ ID NO: 380044 - DNA, 12 bp, Artificial Sequence
  Oligonucleotide primer for the detection of SNP TSC0063604
taaaacttcatt

SEQ ID NO: 380045 - DNA, 12 bp, Artificial Sequence
  Oligonucleotide primer for the detection of SNP TSC0063604
taaaacttcgtt

SEQ ID NO: 380046 - DNA, 12 bp, Artificial Sequence
  Oligonucleotide primer for the detection of SNP TSC0063604
tttgtagtgtta

SEQ ID NO: 380047 - DNA, 12 bp, Artificial Sequence
  Oligonucleotide primer for the detection of SNP TSC0063604
ttcgtagtgtta

SEQ ID NO: 380048 - DNA, 12 bp, Artificial Sequence
  Oligonucleotide primer for the detection of SNP TSC0063605
attctttaaaac

SEQ ID NO: 380049 - DNA, 12 bp, Artificial Sequence
  Oligonucleotide primer for the detection of SNP TSC0063605
ggatagatgata

SEQ ID NO: 380050 - DNA, 12 bp, Artificial Sequence
  Oligonucleotide primer for the detection of SNP TSC0063606
tccccaaccata

SEQ ID NO: 380051 - DNA, 12 bp, Artificial Sequence
  Oligonucleotide primer for the detection of SNP TSC0063606
aactcataattc

SEQ ID NO: 380052 - DNA, 12 bp, Artificial Sequence
  Oligonucleotide primer for the detection of SNP TSC0063607
tatgtttgtttg

SEQ ID NO: 380053 - DNA, 12 bp, Artificial Sequence
  Oligonucleotide primer for the detection of SNP TSC0063609
tatgtaaataaa

SEQ ID NO: 380054 - DNA, 12 bp, Artificial Sequence
  Oligonucleotide primer for the detection of SNP TSC0063609
tacgtaaataaa

SEQ ID NO: 380055 - DNA, 12 bp, Artificial Sequence
  Oligonucleotide primer for the detection of SNP TSC0063609
tacataaacaaa

SEQ ID NO: 380056 - DNA, 12 bp, Artificial Sequence
  Oligonucleotide primer for the detection of SNP TSC0063609
tacgtaaacaaa

SEQ ID NO: 380057 - DNA, 12 bp, Artificial Sequence
  Oligonucleotide primer for the detection of SNP TSC0063609
gttaaggtaaat

SEQ ID NO: 380058 - DNA, 12 bp, Artificial Sequence
  Oligonucleotide primer for the detection of SNP TSC0063610
taataatttagg

SEQ ID NO: 380059 - DNA, 12 bp, Artificial Sequence
  Oligonucleotide primer for the detection of SNP TSC0063611
cacaaatataac

SEQ ID NO: 380060 - DNA, 12 bp, Artificial Sequence
  Oligonucleotide primer for the detection of SNP TSC0063611
tgtggtgtttga

SEQ ID NO: 380061 - DNA, 12 bp, Artificial Sequence
  Oligonucleotide primer for the detection of SNP TSC0063611
tataatatctaa

SEQ ID NO: 380062 - DNA, 12 bp, Artificial Sequence
  Oligonucleotide primer for the detection of SNP TSC0063611
tataaatgtagc

SEQ ID NO: 380063 - DNA, 12 bp, Artificial Sequence
  Oligonucleotide primer for the detection of SNP TSC0063612
ttacttaaactc

SEQ ID NO: 380064 - DNA, 12 bp, Artificial Sequence
  Oligonucleotide primer for the detection of SNP TSC0063612
gaaaaattgagg

SEQ ID NO: 380065 - DNA, 12 bp, Artificial Sequence
  Oligonucleotide primer for the detection of SNP TSC0004588
aaattacaattc

SEQ ID NO: 380066 - DNA, 12 bp, Artificial Sequence
  Oligonucleotide primer for the detection of SNP TSC0004588
agattgtaattt

SEQ ID NO: 380067 - DNA, 12 bp, Artificial Sequence
  Oligonucleotide primer for the detection of SNP TSC0063619
aatccaaatccc

SEQ ID NO: 380068 - DNA, 12 bp, Artificial Sequence
  Oligonucleotide primer for the detection of SNP TSC0063619
atttaggtgaga

SEQ ID NO: 380069 - DNA, 12 bp, Artificial Sequence
  Oligonucleotide primer for the detection of SNP TSC0063620
cttccttaccaa

SEQ ID NO: 380070 - DNA, 12 bp, Artificial Sequence
  Oligonucleotide primer for the detection of SNP TSC0063620
gatttaggattt

SEQ ID NO: 380071 - DNA, 12 bp, Artificial Sequence
  Oligonucleotide primer for the detection of SNP TSC0010773
attctccaaccc

SEQ ID NO: 380072 - DNA, 12 bp, Artificial Sequence
  Oligonucleotide primer for the detection of SNP TSC0010773
gaattaaatagg

SEQ ID NO: 380073 - DNA, 12 bp, Artificial Sequence
  Oligonucleotide primer for the detection of SNP TSC0005980
ctctattataca

SEQ ID NO: 380074 - DNA, 12 bp, Artificial Sequence
  Oligonucleotide primer for the detection of SNP TSC0005980
aaccatttaaaa

SEQ ID NO: 380075 - DNA, 12 bp, Artificial Sequence
  Oligonucleotide primer for the detection of SNP TSC0005981
taatatttaaat

SEQ ID NO: 380076 - DNA, 12 bp, Artificial Sequence
  Oligonucleotide primer for the detection of SNP TSC0063622
ggaatttaaggt

SEQ ID NO: 380077 - DNA, 12 bp, Artificial Sequence
  Oligonucleotide primer for the detection of SNP TSC0063622
agaatgagattt

SEQ ID NO: 380078 - DNA, 12 bp, Artificial Sequence
  Oligonucleotide primer for the detection of SNP TSC0005337
acaataataact

SEQ ID NO: 380079 - DNA, 12 bp, Artificial Sequence
  Oligonucleotide primer for the detection of SNP TSC0005337
acgataataact

SEQ ID NO: 380080 - DNA, 12 bp, Artificial Sequence
  Oligonucleotide primer for the detection of SNP TSC0005337
tactcccttcaa

SEQ ID NO: 380081 - DNA, 12 bp, Artificial Sequence
  Oligonucleotide primer for the detection of SNP TSC0005337
gtggtggtggtt

SEQ ID NO: 380082 - DNA, 12 bp, Artificial Sequence
  Oligonucleotide primer for the detection of SNP TSC0005337
gcggtggtggtt

SEQ ID NO: 380083 - DNA, 12 bp, Artificial Sequence
  Oligonucleotide primer for the detection of SNP TSC0063624
caatttaaaaat

SEQ ID NO: 380084 - DNA, 12 bp, Artificial Sequence
  Oligonucleotide primer for the detection of SNP TSC0063624
gttataaggaaa

SEQ ID NO: 380085 - DNA, 12 bp, Artificial Sequence
  Oligonucleotide primer for the detection of SNP TSC0063627
ttaaacaattct

SEQ ID NO: 380086 - DNA, 12 bp, Artificial Sequence
  Oligonucleotide primer for the detection of SNP TSC0063627
agattgaggtag

SEQ ID NO: 380087 - DNA, 12 bp, Artificial Sequence
  Oligonucleotide primer for the detection of SNP TSC0063628
aactcaaatttt

SEQ ID NO: 380088 - DNA, 12 bp, Artificial Sequence
  Oligonucleotide primer for the detection of SNP TSC0063628
aataatattttt

SEQ ID NO: 380089 - DNA, 12 bp, Artificial Sequence
  Oligonucleotide primer for the detection of SNP TSC0063628
agtttaagtttt

SEQ ID NO: 380090 - DNA, 12 bp, Artificial Sequence
  Oligonucleotide primer for the detection of SNP TSC0063629
atagatttgata

SEQ ID NO: 380091 - DNA, 12 bp, Artificial Sequence
  Oligonucleotide primer for the detection of SNP TSC0063631
cctctacattct

SEQ ID NO: 380092 - DNA, 12 bp, Artificial Sequence
  Oligonucleotide primer for the detection of SNP TSC0063631
tgaatttaagga

SEQ ID NO: 380093 - DNA, 12 bp, Artificial Sequence
  Oligonucleotide primer for the detection of SNP TSC0063632
aaaaacacatcc

SEQ ID NO: 380094 - DNA, 12 bp, Artificial Sequence
  Oligonucleotide primer for the detection of SNP TSC0063633
tttgttttattg

SEQ ID NO: 380095 - DNA, 12 bp, Artificial Sequence
  Oligonucleotide primer for the detection of SNP TSC0063636
ttaagttgttgt

SEQ ID NO: 380096 - DNA, 12 bp, Artificial Sequence
  Oligonucleotide primer for the detection of SNP TSC0063636
ttaagttgttgc

SEQ ID NO: 380097 - DNA, 12 bp, Artificial Sequence
  Oligonucleotide primer for the detection of SNP TSC0063636
ttaaactattac

SEQ ID NO: 380098 - DNA, 12 bp, Artificial Sequence
  Oligonucleotide primer for the detection of SNP TSC0063636
ttttagagagat

SEQ ID NO: 380099 - DNA, 12 bp, Artificial Sequence
  Oligonucleotide primer for the detection of SNP TSC0063638
actactcaaaca

SEQ ID NO: 380100 - DNA, 12 bp, Artificial Sequence
  Oligonucleotide primer for the detection of SNP TSC0063638
aagtgaagtttt

SEQ ID NO: 380101 - DNA, 12 bp, Artificial Sequence
  Oligonucleotide primer for the detection of SNP TSC0063638
agttgtttaagt

SEQ ID NO: 380102 - DNA, 12 bp, Artificial Sequence
  Oligonucleotide primer for the detection of SNP TSC0063640
tacaaatctacc

SEQ ID NO: 380103 - DNA, 12 bp, Artificial Sequence
  Oligonucleotide primer for the detection of SNP TSC0063640
tacgaatctacc

SEQ ID NO: 380104 - DNA, 12 bp, Artificial Sequence
  Oligonucleotide primer for the detection of SNP TSC0063640
tgataagggtta

SEQ ID NO: 380105 - DNA, 12 bp, Artificial Sequence
  Oligonucleotide primer for the detection of SNP TSC0063640
tatgagtttgtt

SEQ ID NO: 380106 - DNA, 12 bp, Artificial Sequence
  Oligonucleotide primer for the detection of SNP TSC0063640
tacgagtttgtt

SEQ ID NO: 380107 - DNA, 12 bp, Artificial Sequence
  Oligonucleotide primer for the detection of SNP TSC0063642
ttttttttctta

SEQ ID NO: 380108 - DNA, 12 bp, Artificial Sequence
  Oligonucleotide primer for the detection of SNP TSC0063642
agataataaagt

SEQ ID NO: 380109 - DNA, 12 bp, Artificial Sequence
  Oligonucleotide primer for the detection of SNP TSC0063643
taatatacttct

SEQ ID NO: 380110 - DNA, 12 bp, Artificial Sequence
  Oligonucleotide primer for the detection of SNP TSC0063643
tttttgattgag

SEQ ID NO: 380111 - DNA, 12 bp, Artificial Sequence
  Oligonucleotide primer for the detection of SNP TSC0063643
tttttgatcgag

SEQ ID NO: 380112 - DNA, 12 bp, Artificial Sequence
  Oligonucleotide primer for the detection of SNP TSC0063647
aacattacttaa

SEQ ID NO: 380113 - DNA, 12 bp, Artificial Sequence
  Oligonucleotide primer for the detection of SNP TSC0063647
aaagttttaaat

SEQ ID NO: 380114 - DNA, 12 bp, Artificial Sequence
  Oligonucleotide primer for the detection of SNP TSC0008796
taaataacttaa

SEQ ID NO: 380115 - DNA, 12 bp, Artificial Sequence
  Oligonucleotide primer for the detection of SNP TSC0008796
ttatattaaggg

SEQ ID NO: 380116 - DNA, 12 bp, Artificial Sequence
  Oligonucleotide primer for the detection of SNP TSC0008796
tcataccaaaaa

SEQ ID NO: 380117 - DNA, 12 bp, Artificial Sequence
  Oligonucleotide primer for the detection of SNP TSC0008796
tgaatggtttag

SEQ ID NO: 380118 - DNA, 12 bp, Artificial Sequence
  Oligonucleotide primer for the detection of SNP TSC0008797
tagttggtatta

SEQ ID NO: 380119 - DNA, 12 bp, Artificial Sequence
  Oligonucleotide primer for the detection of SNP TSC0008797
caattaacatta

SEQ ID NO: 380120 - DNA, 12 bp, Artificial Sequence
  Oligonucleotide primer for the detection of SNP TSC0008797
atgaggataaaa

SEQ ID NO: 380121 - DNA, 12 bp, Artificial Sequence
  Oligonucleotide primer for the detection of SNP TSC0063648
ttaccaattaaa

SEQ ID NO: 380122 - DNA, 12 bp, Artificial Sequence
  Oligonucleotide primer for the detection of SNP TSC0063648
aaagggtaaaat

SEQ ID NO: 380123 - DNA, 12 bp, Artificial Sequence
  Oligonucleotide primer for the detection of SNP TSC0063649
tacatcttaaat

SEQ ID NO: 380124 - DNA, 12 bp, Artificial Sequence
  Oligonucleotide primer for the detection of SNP TSC0063649
ttttaattggtg

SEQ ID NO: 380125 - DNA, 12 bp, Artificial Sequence
  Oligonucleotide primer for the detection of SNP TSC0063649
ttttaatcggtg

SEQ ID NO: 380126 - DNA, 12 bp, Artificial Sequence
  Oligonucleotide primer for the detection of SNP TSC0063650
aaaacaattctc

SEQ ID NO: 380127 - DNA, 12 bp, Artificial Sequence
  Oligonucleotide primer for the detection of SNP TSC0063650
aaaacgattctc

SEQ ID NO: 380128 - DNA, 12 bp, Artificial Sequence
  Oligonucleotide primer for the detection of SNP TSC0063651
gaggtaagagaa

SEQ ID NO: 380129 - DNA, 12 bp, Artificial Sequence
  Oligonucleotide primer for the detection of SNP TSC0063653
cccaaatcccat

SEQ ID NO: 380130 - DNA, 12 bp, Artificial Sequence
  Oligonucleotide primer for the detection of SNP TSC0063654
acacatacttaa

SEQ ID NO: 380131 - DNA, 12 bp, Artificial Sequence
  Oligonucleotide primer for the detection of SNP TSC0063654
aaggtgtattgt

SEQ ID NO: 380132 - DNA, 12 bp, Artificial Sequence
  Oligonucleotide primer for the detection of SNP TSC0063654
aaaatacactac

SEQ ID NO: 380133 - DNA, 12 bp, Artificial Sequence
  Oligonucleotide primer for the detection of SNP TSC0063654
atatatgtttga

SEQ ID NO: 380134 - DNA, 12 bp, Artificial Sequence
  Oligonucleotide primer for the detection of SNP TSC0063656
tcctatttttta

SEQ ID NO: 380135 - DNA, 12 bp, Artificial Sequence
  Oligonucleotide primer for the detection of SNP TSC0063656
aaaagagattgt

SEQ ID NO: 380136 - DNA, 12 bp, Artificial Sequence
  Oligonucleotide primer for the detection of SNP TSC0063657
tataatataacc

SEQ ID NO: 380137 - DNA, 12 bp, Artificial Sequence
  Oligonucleotide primer for the detection of SNP TSC0063657
ttagagaatttg

SEQ ID NO: 380138 - DNA, 12 bp, Artificial Sequence
  Oligonucleotide primer for the detection of SNP TSC0063657
tgtaatatggtt

SEQ ID NO: 380139 - DNA, 12 bp, Artificial Sequence
  Oligonucleotide primer for the detection of SNP TSC0063657
tgtaatatggtc

SEQ ID NO: 380140 - DNA, 12 bp, Artificial Sequence
  Oligonucleotide primer for the detection of SNP TSC0063658
aaaatatctcta

SEQ ID NO: 380141 - DNA, 12 bp, Artificial Sequence
  Oligonucleotide primer for the detection of SNP TSC0063658
tgaaatattttt

SEQ ID NO: 380142 - DNA, 12 bp, Artificial Sequence
  Oligonucleotide primer for the detection of SNP TSC0001116
tcaacaaaaatt

SEQ ID NO: 380143 - DNA, 12 bp, Artificial Sequence
  Oligonucleotide primer for the detection of SNP TSC0001116
ttttgtgatatg

SEQ ID NO: 380144 - DNA, 12 bp, Artificial Sequence
  Oligonucleotide primer for the detection of SNP TSC0008760
ctatacctaaac

SEQ ID NO: 380145 - DNA, 12 bp, Artificial Sequence
  Oligonucleotide primer for the detection of SNP TSC0008760
tttgtgtgtaaa

SEQ ID NO: 380146 - DNA, 12 bp, Artificial Sequence
  Oligonucleotide primer for the detection of SNP TSC0063659
atatatacacaa

SEQ ID NO: 380147 - DNA, 12 bp, Artificial Sequence
  Oligonucleotide primer for the detection of SNP TSC0063659
atatatacacga

SEQ ID NO: 380148 - DNA, 12 bp, Artificial Sequence
  Oligonucleotide primer for the detection of SNP TSC0063659
ccctttccccaa

SEQ ID NO: 380149 - DNA, 12 bp, Artificial Sequence
  Oligonucleotide primer for the detection of SNP TSC0063659
gtgtgtatatgg

SEQ ID NO: 380150 - DNA, 12 bp, Artificial Sequence
  Oligonucleotide primer for the detection of SNP TSC0063659
gtgtgtatacgg

SEQ ID NO: 380151 - DNA, 12 bp, Artificial Sequence
  Oligonucleotide primer for the detection of SNP TSC0063660
acaaaacaaact

SEQ ID NO: 380152 - DNA, 12 bp, Artificial Sequence
  Oligonucleotide primer for the detection of SNP TSC0063660
tgtttaagtttt

SEQ ID NO: 380153 - DNA, 12 bp, Artificial Sequence
  Oligonucleotide primer for the detection of SNP TSC0063660
gtagggtaagtt

SEQ ID NO: 380154 - DNA, 12 bp, Artificial Sequence
  Oligonucleotide primer for the detection of SNP TSC0063663
ggatagtgttta

SEQ ID NO: 380155 - DNA, 12 bp, Artificial Sequence
  Oligonucleotide primer for the detection of SNP TSC0063664
ttaataaatact

SEQ ID NO: 380156 - DNA, 12 bp, Artificial Sequence
  Oligonucleotide primer for the detection of SNP TSC0063664
gatgtgatgtga

SEQ ID NO: 380157 - DNA, 12 bp, Artificial Sequence
  Oligonucleotide primer for the detection of SNP TSC0063664
aatataatataa

SEQ ID NO: 380158 - DNA, 12 bp, Artificial Sequence
  Oligonucleotide primer for the detection of SNP TSC0063664
ttaatgaatatt

SEQ ID NO: 380159 - DNA, 12 bp, Artificial Sequence
  Oligonucleotide primer for the detection of SNP TSC0063665
ccacaactttat

SEQ ID NO: 380160 - DNA, 12 bp, Artificial Sequence
  Oligonucleotide primer for the detection of SNP TSC0063665
ccgcaactttat

SEQ ID NO: 380161 - DNA, 12 bp, Artificial Sequence
  Oligonucleotide primer for the detection of SNP TSC0063666
atctcttaataa

SEQ ID NO: 380162 - DNA, 12 bp, Artificial Sequence
  Oligonucleotide primer for the detection of SNP TSC0063666
gtgattgtagta

SEQ ID NO: 380163 - DNA, 12 bp, Artificial Sequence
  Oligonucleotide primer for the detection of SNP TSC0063666
gtgatcgtagta

SEQ ID NO: 380164 - DNA, 12 bp, Artificial Sequence
  Oligonucleotide primer for the detection of SNP TSC0063666
ataatcataata

SEQ ID NO: 380165 - DNA, 12 bp, Artificial Sequence
  Oligonucleotide primer for the detection of SNP TSC0063666
ataatcgtaata

SEQ ID NO: 380166 - DNA, 12 bp, Artificial Sequence
  Oligonucleotide primer for the detection of SNP TSC0063666
attttttaatga

SEQ ID NO: 380167 - DNA, 12 bp, Artificial Sequence
  Oligonucleotide primer for the detection of SNP TSC0063667
aaatacctcatt

SEQ ID NO: 380168 - DNA, 12 bp, Artificial Sequence
  Oligonucleotide primer for the detection of SNP TSC0063667
ttgggaaggata

SEQ ID NO: 380169 - DNA, 12 bp, Artificial Sequence
  Oligonucleotide primer for the detection of SNP TSC0063668
ttcattcacata

SEQ ID NO: 380170 - DNA, 12 bp, Artificial Sequence
  Oligonucleotide primer for the detection of SNP TSC0063668
catttttaatat

SEQ ID NO: 380171 - DNA, 12 bp, Artificial Sequence
  Oligonucleotide primer for the detection of SNP TSC0063669
attaaaatatcc

SEQ ID NO: 380172 - DNA, 12 bp, Artificial Sequence
  Oligonucleotide primer for the detection of SNP TSC0063669
attatttgaata

SEQ ID NO: 380173 - DNA, 12 bp, Artificial Sequence
  Oligonucleotide primer for the detection of SNP TSC0063669
attgaaatattt

SEQ ID NO: 380174 - DNA, 12 bp, Artificial Sequence
  Oligonucleotide primer for the detection of SNP TSC0000877
aaacattcctac

SEQ ID NO: 380175 - DNA, 12 bp, Artificial Sequence
  Oligonucleotide primer for the detection of SNP TSC0000877
aagaatgtataa

SEQ ID NO: 380176 - DNA, 12 bp, Artificial Sequence
  Oligonucleotide primer for the detection of SNP TSC0063673
cattcacccaac

SEQ ID NO: 380177 - DNA, 12 bp, Artificial Sequence
  Oligonucleotide primer for the detection of SNP TSC0063673
atagtgagttgg

SEQ ID NO: 380178 - DNA, 12 bp, Artificial Sequence
  Oligonucleotide primer for the detection of SNP TSC0063674
acctaaatacct

SEQ ID NO: 380179 - DNA, 12 bp, Artificial Sequence
  Oligonucleotide primer for the detection of SNP TSC0063674
ttatgtatgttt

SEQ ID NO: 380180 - DNA, 12 bp, Artificial Sequence
  Oligonucleotide primer for the detection of SNP TSC0063674
atatatatctaa

SEQ ID NO: 380181 - DNA, 12 bp, Artificial Sequence
  Oligonucleotide primer for the detection of SNP TSC0063674
gtttggatgttt

SEQ ID NO: 380182 - DNA, 12 bp, Artificial Sequence
  Oligonucleotide primer for the detection of SNP TSC0063675
agtgtgaattta

SEQ ID NO: 380183 - DNA, 12 bp, Artificial Sequence
  Oligonucleotide primer for the detection of SNP TSC0063679
ggaagtttattt

SEQ ID NO: 380184 - DNA, 12 bp, Artificial Sequence
  Oligonucleotide primer for the detection of SNP TSC0063679
aaaaaatccacc

SEQ ID NO: 380185 - DNA, 12 bp, Artificial Sequence
  Oligonucleotide primer for the detection of SNP TSC0063679
tattttaaaaag

SEQ ID NO: 380186 - DNA, 12 bp, Artificial Sequence
  Oligonucleotide primer for the detection of SNP TSC0063681
tttttagaataa

SEQ ID NO: 380187 - DNA, 12 bp, Artificial Sequence
  Oligonucleotide primer for the detection of SNP TSC0063682
tttctctttaaa

SEQ ID NO: 380188 - DNA, 12 bp, Artificial Sequence
  Oligonucleotide primer for the detection of SNP TSC0063682
tctttattaaat

SEQ ID NO: 380189 - DNA, 12 bp, Artificial Sequence
  Oligonucleotide primer for the detection of SNP TSC0063684
aatcctaaaaat

SEQ ID NO: 380190 - DNA, 12 bp, Artificial Sequence
  Oligonucleotide primer for the detection of SNP TSC0063684
aactttcaccta

SEQ ID NO: 380191 - DNA, 12 bp, Artificial Sequence
  Oligonucleotide primer for the detection of SNP TSC0063684
agttttaaaggt

SEQ ID NO: 380192 - DNA, 12 bp, Artificial Sequence
  Oligonucleotide primer for the detection of SNP TSC0007733
ggttgggtaagg

SEQ ID NO: 380193 - DNA, 12 bp, Artificial Sequence
  Oligonucleotide primer for the detection of SNP TSC0063689
tatttctaactc

SEQ ID NO: 380194 - DNA, 12 bp, Artificial Sequence
  Oligonucleotide primer for the detection of SNP TSC0063689
gtagttggttta

SEQ ID NO: 380195 - DNA, 12 bp, Artificial Sequence
  Oligonucleotide primer for the detection of SNP TSC0010251
tctactttcacc

SEQ ID NO: 380196 - DNA, 12 bp, Artificial Sequence
  Oligonucleotide primer for the detection of SNP TSC0010251
tggtatatatta

SEQ ID NO: 380197 - DNA, 12 bp, Artificial Sequence
  Oligonucleotide primer for the detection of SNP TSC0010293
actaatcatcct

SEQ ID NO: 380198 - DNA, 12 bp, Artificial Sequence
  Oligonucleotide primer for the detection of SNP TSC0010293
tttaattgatta

SEQ ID NO: 380199 - DNA, 12 bp, Artificial Sequence
  Oligonucleotide primer for the detection of SNP TSC0063693
ataatttggaaa

SEQ ID NO: 380200 - DNA, 12 bp, Artificial Sequence
  Oligonucleotide primer for the detection of SNP TSC0063694
taaaggtgattt

SEQ ID NO: 380201 - DNA, 12 bp, Artificial Sequence
  Oligonucleotide primer for the detection of SNP TSC0063694
aaaaggaagaat

SEQ ID NO: 380202 - DNA, 12 bp, Artificial Sequence
  Oligonucleotide primer for the detection of SNP TSC0063695
aagtttaggaaa

SEQ ID NO: 380203 - DNA, 12 bp, Artificial Sequence
  Oligonucleotide primer for the detection of SNP TSC0001589
aattaaccaaat

SEQ ID NO: 380204 - DNA, 12 bp, Artificial Sequence
  Oligonucleotide primer for the detection of SNP TSC0001589
tgtatgttaata

SEQ ID NO: 380205 - DNA, 12 bp, Artificial Sequence
  Oligonucleotide primer for the detection of SNP TSC0001590
aatcctcctacc

SEQ ID NO: 380206 - DNA, 12 bp, Artificial Sequence
  Oligonucleotide primer for the detection of SNP TSC0001590
tttgagaagttg

SEQ ID NO: 380207 - DNA, 12 bp, Artificial Sequence
  Oligonucleotide primer for the detection of SNP TSC0063696
catctaaaacaa

SEQ ID NO: 380208 - DNA, 12 bp, Artificial Sequence
  Oligonucleotide primer for the detection of SNP TSC0063696
cgtctaaaacaa

SEQ ID NO: 380209 - DNA, 12 bp, Artificial Sequence
  Oligonucleotide primer for the detection of SNP TSC0063696
aattgaagaggg

SEQ ID NO: 380210 - DNA, 12 bp, Artificial Sequence
  Oligonucleotide primer for the detection of SNP TSC0063696
tgtttaaggtaa

SEQ ID NO: 380211 - DNA, 12 bp, Artificial Sequence
  Oligonucleotide primer for the detection of SNP TSC0063696
cgtttaaggtaa

SEQ ID NO: 380212 - DNA, 12 bp, Artificial Sequence
  Oligonucleotide primer for the detection of SNP TSC0063697
tgtggagggata

SEQ ID NO: 380213 - DNA, 12 bp, Artificial Sequence
  Oligonucleotide primer for the detection of SNP TSC0063698
tacacataacat

SEQ ID NO: 380214 - DNA, 12 bp, Artificial Sequence
  Oligonucleotide primer for the detection of SNP TSC0063698
ttaattttagag

SEQ ID NO: 380215 - DNA, 12 bp, Artificial Sequence
  Oligonucleotide primer for the detection of SNP TSC0000679
acctataccaaa

SEQ ID NO: 380216 - DNA, 12 bp, Artificial Sequence
  Oligonucleotide primer for the detection of SNP TSC0000679
acctataccgaa

SEQ ID NO: 380217 - DNA, 12 bp, Artificial Sequence
  Oligonucleotide primer for the detection of SNP TSC0000679
ggtttttggttt

SEQ ID NO: 380218 - DNA, 12 bp, Artificial Sequence
  Oligonucleotide primer for the detection of SNP TSC0000679
aattcctaattt

SEQ ID NO: 380219 - DNA, 12 bp, Artificial Sequence
  Oligonucleotide primer for the detection of SNP TSC0000679
atttgtattgaa

SEQ ID NO: 380220 - DNA, 12 bp, Artificial Sequence
  Oligonucleotide primer for the detection of SNP TSC0000679
atttgtatcgaa

SEQ ID NO: 380221 - DNA, 12 bp, Artificial Sequence
  Oligonucleotide primer for the detection of SNP TSC0000680
ttaataccaaaa

SEQ ID NO: 380222 - DNA, 12 bp, Artificial Sequence
  Oligonucleotide primer for the detection of SNP TSC0000680
ttacaactctat

SEQ ID NO: 380223 - DNA, 12 bp, Artificial Sequence
  Oligonucleotide primer for the detection of SNP TSC0000680
ttggtattaaga

SEQ ID NO: 380224 - DNA, 12 bp, Artificial Sequence
  Oligonucleotide primer for the detection of SNP TSC0063700
aacaacaaacgc

SEQ ID NO: 380225 - DNA, 12 bp, Artificial Sequence
  Oligonucleotide primer for the detection of SNP TSC0063700
aatttaaattta

SEQ ID NO: 380226 - DNA, 12 bp, Artificial Sequence
  Oligonucleotide primer for the detection of SNP TSC0009751
gtttattttata

SEQ ID NO: 380227 - DNA, 12 bp, Artificial Sequence
  Oligonucleotide primer for the detection of SNP TSC0009751
ttaaaaatggaa

SEQ ID NO: 380228 - DNA, 12 bp, Artificial Sequence
  Oligonucleotide primer for the detection of SNP TSC0063701
ttgtgaggataa

SEQ ID NO: 380229 - DNA, 12 bp, Artificial Sequence
  Oligonucleotide primer for the detection of SNP TSC0010073
tcaataacctta

SEQ ID NO: 380230 - DNA, 12 bp, Artificial Sequence
  Oligonucleotide primer for the detection of SNP TSC0010073
tatttagtatag

SEQ ID NO: 380231 - DNA, 12 bp, Artificial Sequence
  Oligonucleotide primer for the detection of SNP TSC0010073
tacttaacataa

SEQ ID NO: 380232 - DNA, 12 bp, Artificial Sequence
  Oligonucleotide primer for the detection of SNP TSC0008326
agagtattattt

SEQ ID NO: 380233 - DNA, 12 bp, Artificial Sequence
  Oligonucleotide primer for the detection of SNP TSC0008326
aaaacactatct

SEQ ID NO: 380234 - DNA, 12 bp, Artificial Sequence
  Oligonucleotide primer for the detection of SNP TSC0008326
tttttggagttg

SEQ ID NO: 380235 - DNA, 12 bp, Artificial Sequence
  Oligonucleotide primer for the detection of SNP TSC0000387
atcttaaaacat

SEQ ID NO: 380236 - DNA, 12 bp, Artificial Sequence
  Oligonucleotide primer for the detection of SNP TSC0000387
atacttccaaca

SEQ ID NO: 380237 - DNA, 12 bp, Artificial Sequence
  Oligonucleotide primer for the detection of SNP TSC0000387
ttttggaatatt

SEQ ID NO: 380238 - DNA, 12 bp, Artificial Sequence
  Oligonucleotide primer for the detection of SNP TSC0063702
aataaattaccc

SEQ ID NO: 380239 - DNA, 12 bp, Artificial Sequence
  Oligonucleotide primer for the detection of SNP TSC0063702
gaagattttata

SEQ ID NO: 380240 - DNA, 12 bp, Artificial Sequence
  Oligonucleotide primer for the detection of SNP TSC0063702
aaaaattccaca

SEQ ID NO: 380241 - DNA, 12 bp, Artificial Sequence
  Oligonukleotid-Primer
gatgagttattt

SEQ ID NO: 380242 - DNA, 12 bp, Artificial Sequence
  Oligonucleotide primer for the detection of SNP TSC0001267
aatctccctcta

SEQ ID NO: 380243 - DNA, 12 bp, Artificial Sequence
  Oligonucleotide primer for the detection of SNP TSC0001268
atctcaacctca

SEQ ID NO: 380244 - DNA, 12 bp, Artificial Sequence
  Oligonucleotide primer for the detection of SNP TSC0001268
tcccaactactc

SEQ ID NO: 380245 - DNA, 12 bp, Artificial Sequence
  Oligonucleotide primer for the detection of SNP TSC0063704
tatttcaatttc

SEQ ID NO: 380246 - DNA, 12 bp, Artificial Sequence
  Oligonucleotide primer for the detection of SNP TSC0063704
taaaatatgtga

SEQ ID NO: 380247 - DNA, 12 bp, Artificial Sequence
  Oligonucleotide primer for the detection of SNP TSC0063704
taaaatatgcga

SEQ ID NO: 380248 - DNA, 12 bp, Artificial Sequence
  Oligonucleotide primer for the detection of SNP TSC0063711
ttactatatcca

SEQ ID NO: 380249 - DNA, 12 bp, Artificial Sequence
  Oligonucleotide primer for the detection of SNP TSC0063711
attctacatact

SEQ ID NO: 380250 - DNA, 12 bp, Artificial Sequence
  Oligonucleotide primer for the detection of SNP TSC0063712
caaattacaact

SEQ ID NO: 380251 - DNA, 12 bp, Artificial Sequence
  Oligonucleotide primer for the detection of SNP TSC0063712
tgttagaaatga

SEQ ID NO: 380252 - DNA, 12 bp, Artificial Sequence
  Oligonucleotide primer for the detection of SNP TSC0063712
taccaaaaataa

SEQ ID NO: 380253 - DNA, 12 bp, Artificial Sequence
  Oligonukleotid-Primer
tagattgtagtt

SEQ ID NO: 380254 - DNA, 12 bp, Artificial Sequence
  Oligonucleotide primer for the detection of SNP TSC0063713
aaaaataatttc

SEQ ID NO: 380255 - DNA, 12 bp, Artificial Sequence
  Oligonucleotide primer for the detection of SNP TSC0063714
acataatcataa

SEQ ID NO: 380256 - DNA, 12 bp, Artificial Sequence
  Oligonucleotide primer for the detection of SNP TSC0063714
atcataatatta

SEQ ID NO: 380257 - DNA, 12 bp, Artificial Sequence
  Oligonukleotid-Primer
atgtataattat

SEQ ID NO: 380258 - DNA, 12 bp, Artificial Sequence
  Oligonucleotide primer for the detection of SNP TSC0063724
ttaaaccaactt

SEQ ID NO: 380259 - DNA, 12 bp, Artificial Sequence
  Oligonucleotide primer for the detection of SNP TSC0063724
aggtttagaatg

SEQ ID NO: 380260 - DNA, 12 bp, Artificial Sequence
  Oligonucleotide primer for the detection of SNP TSC0063725
aaattctatatc

SEQ ID NO: 380261 - DNA, 12 bp, Artificial Sequence
  Oligonukleotid-Primer
gatattattata

SEQ ID NO: 380262 - DNA, 12 bp, Artificial Sequence
  Oligonucleotide primer for the detection of SNP TSC0063726
atagataaaaag

SEQ ID NO: 380263 - DNA, 12 bp, Artificial Sequence
  Oligonucleotide primer for the detection of SNP TSC0063727
  unsure (6..): unknown base
caaaanntatat

SEQ ID NO: 380264 - DNA, 12 bp, Artificial Sequence
  Oligonucleotide primer for the detection of SNP TSC0063727
tgaataaaattg

SEQ ID NO: 380265 - DNA, 12 bp, Artificial Sequence
  Oligonucleotide primer for the detection of SNP TSC0063728
acaaacttaata

SEQ ID NO: 380266 - DNA, 12 bp, Artificial Sequence
  Oligonucleotide primer for the detection of SNP TSC0063728
taaatgaatgat

SEQ ID NO: 380267 - DNA, 12 bp, Artificial Sequence
  Oligonucleotide primer for the detection of SNP TSC0063728
ataaatttgatg

SEQ ID NO: 380268 - DNA, 12 bp, Artificial Sequence
  Oligonucleotide primer for the detection of SNP TSC0010746
cccaaacccaat

SEQ ID NO: 380269 - DNA, 12 bp, Artificial Sequence
  Oligonukleotid-Primer
gttgtagagtga

SEQ ID NO: 380270 - DNA, 12 bp, Artificial Sequence
  Oligonucleotide primer for the detection of SNP TSC0063729
taataaaactcg

SEQ ID NO: 380271 - DNA, 12 bp, Artificial Sequence
  Oligonucleotide primer for the detection of SNP TSC0063729
tagaagagaggt

SEQ ID NO: 380272 - DNA, 12 bp, Artificial Sequence
  Oligonucleotide primer for the detection of SNP TSC0063729
taatagagtttg

SEQ ID NO: 380273 - DNA, 12 bp, Artificial Sequence
  Oligonucleotide primer for the detection of SNP TSC0063729
taatagagttcg

SEQ ID NO: 380274 - DNA, 12 bp, Artificial Sequence
  Oligonucleotide primer for the detection of SNP TSC0063732
aacacctataat

SEQ ID NO: 380275 - DNA, 12 bp, Artificial Sequence
  Oligonucleotide primer for the detection of SNP TSC0063732
ttgagtagttga

SEQ ID NO: 380276 - DNA, 12 bp, Artificial Sequence
  Oligonucleotide primer for the detection of SNP TSC0063732
tcgagtagttga

SEQ ID NO: 380277 - DNA, 12 bp, Artificial Sequence
  Oligonucleotide primer for the detection of SNP TSC0010530
aaaactactcca

SEQ ID NO: 380278 - DNA, 12 bp, Artificial Sequence
  Oligonucleotide primer for the detection of SNP TSC0010530
ttatttaaattg

SEQ ID NO: 380279 - DNA, 12 bp, Artificial Sequence
  Oligonucleotide primer for the detection of SNP TSC0010530
tcatctaaacta

SEQ ID NO: 380280 - DNA, 12 bp, Artificial Sequence
  Oligonucleotide primer for the detection of SNP TSC0010531
tattagaaaaaa

SEQ ID NO: 380281 - DNA, 12 bp, Artificial Sequence
  Oligonucleotide primer for the detection of SNP TSC0063738
aatattcaaaat

SEQ ID NO: 380282 - DNA, 12 bp, Artificial Sequence
  Oligonucleotide primer for the detection of SNP TSC0063738
aatattttgtaa

SEQ ID NO: 380283 - DNA, 12 bp, Artificial Sequence
  Oligonucleotide primer for the detection of SNP TSC0063739
acattctcacta

SEQ ID NO: 380284 - DNA, 12 bp, Artificial Sequence
  Oligonucleotide primer for the detection of SNP TSC0063739
tacacacatata

SEQ ID NO: 380285 - DNA, 12 bp, Artificial Sequence
  Oligonucleotide primer for the detection of SNP TSC0063740
taatctttataa

SEQ ID NO: 380286 - DNA, 12 bp, Artificial Sequence
  Oligonucleotide primer for the detection of SNP TSC0063740
atttgtggagtt

SEQ ID NO: 380287 - DNA, 12 bp, Artificial Sequence
  Oligonucleotide primer for the detection of SNP TSC0063742
tcacaaaacttc

SEQ ID NO: 380288 - DNA, 12 bp, Artificial Sequence
  Oligonucleotide primer for the detection of SNP TSC0063742
aagagatttttg

SEQ ID NO: 380289 - DNA, 12 bp, Artificial Sequence
  Oligonukleotid-Primer
tttggataaagg

SEQ ID NO: 380290 - DNA, 12 bp, Artificial Sequence
  Oligonucleotide primer for the detection of SNP TSC0063747
ttaccatccaaa

SEQ ID NO: 380291 - DNA, 12 bp, Artificial Sequence
  Oligonucleotide primer for the detection of SNP TSC0063747
taatgaaggaat

SEQ ID NO: 380292 - DNA, 12 bp, Artificial Sequence
  Oligonucleotide primer for the detection of SNP TSC0063747
taatgaaggaac

SEQ ID NO: 380293 - DNA, 12 bp, Artificial Sequence
  Oligonucleotide primer for the detection of SNP TSC0063747
tattatttagat

SEQ ID NO: 380294 - DNA, 12 bp, Artificial Sequence
  Oligonucleotide primer for the detection of SNP TSC0063749
aaatctctttct

SEQ ID NO: 380295 - DNA, 12 bp, Artificial Sequence
  Oligonucleotide primer for the detection of SNP TSC0063749
tgtatatataga

SEQ ID NO: 380296 - DNA, 12 bp, Artificial Sequence
  Oligonucleotide primer for the detection of SNP TSC0063750
ttggggagggtt

SEQ ID NO: 380297 - DNA, 12 bp, Artificial Sequence
  Oligonukleotid-Primer
taagttaggaag

SEQ ID NO: 380298 - DNA, 12 bp, Artificial Sequence
  Oligonucleotide primer for the detection of SNP TSC0063751
tgaaagagagat

SEQ ID NO: 380299 - DNA, 12 bp, Artificial Sequence
  Oligonucleotide primer for the detection of SNP TSC0063752
tctctctctctt

SEQ ID NO: 380300 - DNA, 12 bp, Artificial Sequence
  Oligonucleotide primer for the detection of SNP TSC0063753
ttttattgttac

SEQ ID NO: 380301 - DNA, 12 bp, Artificial Sequence
  Oligonucleotide primer for the detection of SNP TSC0063753
tcccattatcac

SEQ ID NO: 380302 - DNA, 12 bp, Artificial Sequence
  Oligonucleotide primer for the detection of SNP TSC0063753
tatttgtaaaat

SEQ ID NO: 380303 - DNA, 12 bp, Artificial Sequence
  Oligonucleotide primer for the detection of SNP TSC0063754
atacccaaatct

SEQ ID NO: 380304 - DNA, 12 bp, Artificial Sequence
  Oligonucleotide primer for the detection of SNP TSC0063754
ttcaaatatacc

SEQ ID NO: 380305 - DNA, 12 bp, Artificial Sequence
  Oligonucleotide primer for the detection of SNP TSC0063755
ctctactaactc

SEQ ID NO: 380306 - DNA, 12 bp, Artificial Sequence
  Oligonucleotide primer for the detection of SNP TSC0063755
atgtaatagtga

SEQ ID NO: 380307 - DNA, 12 bp, Artificial Sequence
  Oligonucleotide primer for the detection of SNP TSC0063755
acgtaatagtga

SEQ ID NO: 380308 - DNA, 12 bp, Artificial Sequence
  Oligonucleotide primer for the detection of SNP TSC0063756
taataactcctc

SEQ ID NO: 380309 - DNA, 12 bp, Artificial Sequence
  Oligonukleotid-Primer
agagagggagga

SEQ ID NO: 380310 - DNA, 12 bp, Artificial Sequence
  Oligonucleotide primer for the detection of SNP TSC0063757
ttatggattttt

SEQ ID NO: 380311 - DNA, 12 bp, Artificial Sequence
  Oligonucleotide primer for the detection of SNP TSC0063757
aaggttgggaag

SEQ ID NO: 380312 - DNA, 12 bp, Artificial Sequence
  Oligonucleotide primer for the detection of SNP TSC0063758
tacatttcaact

SEQ ID NO: 380313 - DNA, 12 bp, Artificial Sequence
  Oligonucleotide primer for the detection of SNP TSC0063759
catatatctact

SEQ ID NO: 380314 - DNA, 12 bp, Artificial Sequence
  Oligonucleotide primer for the detection of SNP TSC0063759
tgttgagggtga

SEQ ID NO: 380315 - DNA, 12 bp, Artificial Sequence
  Oligonucleotide primer for the detection of SNP TSC0063759
cgttgagggtga

SEQ ID NO: 380316 - DNA, 12 bp, Artificial Sequence
  Oligonucleotide primer for the detection of SNP TSC0063760
aatctatttata

SEQ ID NO: 380317 - DNA, 12 bp, Artificial Sequence
  Oligonukleotid-Primer
tttagaagttat

SEQ ID NO: 380318 - DNA, 12 bp, Artificial Sequence
  Oligonucleotide primer for the detection of SNP TSC0063761
aaaattataaca

SEQ ID NO: 380319 - DNA, 12 bp, Artificial Sequence
  Oligonucleotide primer for the detection of SNP TSC0063761
taataatatttt

SEQ ID NO: 380320 - DNA, 12 bp, Artificial Sequence
  Oligonucleotide primer for the detection of SNP TSC0063761
aggattatagta

SEQ ID NO: 380321 - DNA, 12 bp, Artificial Sequence
  Oligonukleotid-Primer
actaccaacaaa

SEQ ID NO: 380322 - DNA, 12 bp, Artificial Sequence
  Oligonucleotide primer for the detection of SNP TSC0063762
tctaccttcttc

SEQ ID NO: 380323 - DNA, 12 bp, Artificial Sequence
  Oligonucleotide primer for the detection of SNP TSC0063762
aatgttgttaat

SEQ ID NO: 380324 - DNA, 12 bp, Artificial Sequence
  Oligonucleotide primer for the detection of SNP TSC0063764
ctccttctaaac

SEQ ID NO: 380325 - DNA, 12 bp, Artificial Sequence
  Oligonukleotid-Primer
agtttggtaaag

SEQ ID NO: 380326 - DNA, 12 bp, Artificial Sequence
  Oligonucleotide primer for the detection of SNP TSC0063769
gggtaaggttag

SEQ ID NO: 380327 - DNA, 12 bp, Artificial Sequence
  Oligonucleotide primer for the detection of SNP TSC0063770
aattatccatac

SEQ ID NO: 380328 - DNA, 12 bp, Artificial Sequence
  Oligonucleotide primer for the detection of SNP TSC0063770
gtttatgttgaa

SEQ ID NO: 380329 - DNA, 12 bp, Artificial Sequence
  Oligonucleotide primer for the detection of SNP TSC0063772
ttcatatttatc

SEQ ID NO: 380330 - DNA, 12 bp, Artificial Sequence
  Oligonucleotide primer for the detection of SNP TSC0063773
ttagatttaggg

SEQ ID NO: 380331 - DNA, 12 bp, Artificial Sequence
  Oligonucleotide primer for the detection of SNP TSC0063774
aaaataacttat

SEQ ID NO: 380332 - DNA, 12 bp, Artificial Sequence
  Oligonucleotide primer for the detection of SNP TSC0063775
aatacttccaaa

SEQ ID NO: 380333 - DNA, 12 bp, Artificial Sequence
  Oligonucleotide primer for the detection of SNP TSC0063775
ttccacatctta

SEQ ID NO: 380334 - DNA, 12 bp, Artificial Sequence
  Oligonucleotide primer for the detection of SNP TSC0063775
agtagtgttttt

SEQ ID NO: 380335 - DNA, 12 bp, Artificial Sequence
  Oligonucleotide primer for the detection of SNP TSC0063776
aaaaaactatcc

SEQ ID NO: 380336 - DNA, 12 bp, Artificial Sequence
  Oligonucleotide primer for the detection of SNP TSC0063776
gagaaattgttt

SEQ ID NO: 380337 - DNA, 12 bp, Artificial Sequence
  Oligonucleotide primer for the detection of SNP TSC0063777
aacctactcctt

SEQ ID NO: 380338 - DNA, 12 bp, Artificial Sequence
  Oligonucleotide primer for the detection of SNP TSC0063780
aacttcaaaaac

SEQ ID NO: 380339 - DNA, 12 bp, Artificial Sequence
  Oligonucleotide primer for the detection of SNP TSC0063781
ataaaacaattt

SEQ ID NO: 380340 - DNA, 12 bp, Artificial Sequence
  Oligonucleotide primer for the detection of SNP TSC0063781
aagaattttaaa

SEQ ID NO: 380341 - DNA, 12 bp, Artificial Sequence
  Oligonucleotide primer for the detection of SNP TSC0063782
atctattcatat

SEQ ID NO: 380342 - DNA, 12 bp, Artificial Sequence
  Oligonucleotide primer for the detection of SNP TSC0063782
aatttatatgtg

SEQ ID NO: 380343 - DNA, 12 bp, Artificial Sequence
  Oligonucleotide primer for the detection of SNP TSC0004644
tagaaggtatta

SEQ ID NO: 380344 - DNA, 12 bp, Artificial Sequence
  Oligonucleotide primer for the detection of SNP TSC0063783
acctccaaacaa

SEQ ID NO: 380345 - DNA, 12 bp, Artificial Sequence
  Oligonucleotide primer for the detection of SNP TSC0063783
acctccaaacga

SEQ ID NO: 380346 - DNA, 12 bp, Artificial Sequence
  Oligonucleotide primer for the detection of SNP TSC0063783
gcctccaaacaa

SEQ ID NO: 380347 - DNA, 12 bp, Artificial Sequence
  Oligonucleotide primer for the detection of SNP TSC0063783
gcctccaaacga

SEQ ID NO: 380348 - DNA, 12 bp, Artificial Sequence
  Oligonucleotide primer for the detection of SNP TSC0063783
tgaagtaggaga

SEQ ID NO: 380349 - DNA, 12 bp, Artificial Sequence
  Oligonucleotide primer for the detection of SNP TSC0063783
tgtttttaagtg

SEQ ID NO: 380350 - DNA, 12 bp, Artificial Sequence
  Oligonucleotide primer for the detection of SNP TSC0063783
cgtttttaagtg

SEQ ID NO: 380351 - DNA, 12 bp, Artificial Sequence
  Oligonucleotide primer for the detection of SNP TSC0063783
tgtttttaagcg

SEQ ID NO: 380352 - DNA, 12 bp, Artificial Sequence
  Oligonucleotide primer for the detection of SNP TSC0063783
cgtttttaagcg

SEQ ID NO: 380353 - DNA, 12 bp, Artificial Sequence
  Oligonucleotide primer for the detection of SNP TSC0063785
accaacctccaa

SEQ ID NO: 380354 - DNA, 12 bp, Artificial Sequence
  Oligonucleotide primer for the detection of SNP TSC0063785
attgtagtgttt

SEQ ID NO: 380355 - DNA, 12 bp, Artificial Sequence
  Oligonucleotide primer for the detection of SNP TSC0063785
atcattataata

SEQ ID NO: 380356 - DNA, 12 bp, Artificial Sequence
  Oligonucleotide primer for the detection of SNP TSC0063788
aatattgaaaat

SEQ ID NO: 380357 - DNA, 12 bp, Artificial Sequence
  Oligonukleotid-Primer
acattaaaaata

SEQ ID NO: 380358 - DNA, 12 bp, Artificial Sequence
  Oligonucleotide primer for the detection of SNP TSC0063789
acactctatatc

SEQ ID NO: 380359 - DNA, 12 bp, Artificial Sequence
  Oligonucleotide primer for the detection of SNP TSC0063793
attttcccactc

SEQ ID NO: 380360 - DNA, 12 bp, Artificial Sequence
  Oligonucleotide primer for the detection of SNP TSC0063793
taatagttatag

SEQ ID NO: 380361 - DNA, 12 bp, Artificial Sequence
  Oligonucleotide primer for the detection of SNP TSC0063794
ccattatattaa

SEQ ID NO: 380362 - DNA, 12 bp, Artificial Sequence
  Oligonucleotide primer for the detection of SNP TSC0063794
tgtttttaagtt

SEQ ID NO: 380363 - DNA, 12 bp, Artificial Sequence
  Oligonucleotide primer for the detection of SNP TSC0063794
ataccttcaaac

SEQ ID NO: 380364 - DNA, 12 bp, Artificial Sequence
  Oligonucleotide primer for the detection of SNP TSC0063795
ttttgattatgt

SEQ ID NO: 380365 - DNA, 12 bp, Artificial Sequence
  Oligonukleotid-Primer
ttttaaccatat

SEQ ID NO: 380366 - DNA, 12 bp, Artificial Sequence
  Oligonucleotide primer for the detection of SNP TSC0063796
tctcttaaactc

SEQ ID NO: 380367 - DNA, 12 bp, Artificial Sequence
  Oligonucleotide primer for the detection of SNP TSC0063796
gagaggttaata

SEQ ID NO: 380368 - DNA, 12 bp, Artificial Sequence
  Oligonucleotide primer for the detection of SNP TSC0063800
ttttgttgtaag

SEQ ID NO: 380369 - DNA, 12 bp, Artificial Sequence
  Oligonucleotide primer for the detection of SNP TSC0063801
aaaaactcaaca

SEQ ID NO: 380370 - DNA, 12 bp, Artificial Sequence
  Oligonucleotide primer for the detection of SNP TSC0063801
actatcttacaa

SEQ ID NO: 380371 - DNA, 12 bp, Artificial Sequence
  Oligonucleotide primer for the detection of SNP TSC0008951
atataatttcaa

SEQ ID NO: 380372 - DNA, 12 bp, Artificial Sequence
  Oligonucleotide primer for the detection of SNP TSC0008951
ttttaattaagg

SEQ ID NO: 380373 - DNA, 12 bp, Artificial Sequence
  Oligonukleotid-Primer
tatgattttagt

SEQ ID NO: 380374 - DNA, 12 bp, Artificial Sequence
  Oligonucleotide primer for the detection of SNP TSC0063805
acttttactaca

SEQ ID NO: 380375 - DNA, 12 bp, Artificial Sequence
  Oligonucleotide primer for the detection of SNP TSC0063805
atatttaaattt

SEQ ID NO: 380376 - DNA, 12 bp, Artificial Sequence
  Oligonucleotide primer for the detection of SNP TSC0063805
atatccaaactt

SEQ ID NO: 380377 - DNA, 12 bp, Artificial Sequence
  Oligonucleotide primer for the detection of SNP TSC0063805
gtttttgttgta

SEQ ID NO: 380378 - DNA, 12 bp, Artificial Sequence
  Oligonucleotide primer for the detection of SNP TSC0004996
atataaatcaca

SEQ ID NO: 380379 - DNA, 12 bp, Artificial Sequence
  Oligonucleotide primer for the detection of SNP TSC0004996
tttatttatggt

SEQ ID NO: 380380 - DNA, 12 bp, Artificial Sequence
  Oligonucleotide primer for the detection of SNP TSC0004996
attcatctataa

SEQ ID NO: 380381 - DNA, 12 bp, Artificial Sequence
  Oligonucleotide primer for the detection of SNP TSC0004996
atataaattata

SEQ ID NO: 380382 - DNA, 12 bp, Artificial Sequence
  Oligonucleotide primer for the detection of SNP TSC0010508
aaactaattcac

SEQ ID NO: 380383 - DNA, 12 bp, Artificial Sequence
  Oligonucleotide primer for the detection of SNP TSC0010508
atgtgttagtta

SEQ ID NO: 380384 - DNA, 12 bp, Artificial Sequence
  Oligonucleotide primer for the detection of SNP TSC0063807
ttagtttaaata

SEQ ID NO: 380385 - DNA, 12 bp, Artificial Sequence
  Oligonucleotide primer for the detection of SNP TSC0063807
ccaactcaaaca

SEQ ID NO: 380386 - DNA, 12 bp, Artificial Sequence
  Oligonucleotide primer for the detection of SNP TSC0063807
gtttttaaagag

SEQ ID NO: 380387 - DNA, 12 bp, Artificial Sequence
  Oligonucleotide primer for the detection of SNP TSC0004693
caactacataca

SEQ ID NO: 380388 - DNA, 12 bp, Artificial Sequence
  Oligonucleotide primer for the detection of SNP TSC0004693
aagtagattttt

SEQ ID NO: 380389 - DNA, 12 bp, Artificial Sequence
  Oligonucleotide primer for the detection of SNP TSC0004693
aagtagattttc

SEQ ID NO: 380390 - DNA, 12 bp, Artificial Sequence
  Oligonucleotide primer for the detection of SNP TSC0004693
aaacaaatcctc

SEQ ID NO: 380391 - DNA, 12 bp, Artificial Sequence
  Oligonucleotide primer for the detection of SNP TSC0004693
ttaattgtatat

SEQ ID NO: 380392 - DNA, 12 bp, Artificial Sequence
  Oligonucleotide primer for the detection of SNP TSC0004538
aaactttttatt

SEQ ID NO: 380393 - DNA, 12 bp, Artificial Sequence
  Oligonucleotide primer for the detection of SNP TSC0004538
tgaaatagatta

SEQ ID NO: 380394 - DNA, 12 bp, Artificial Sequence
  Oligonucleotide primer for the detection of SNP TSC0005271
ccttcactataa

SEQ ID NO: 380395 - DNA, 12 bp, Artificial Sequence
  Oligonucleotide primer for the detection of SNP TSC0005271
aaaaaaagtaaa

SEQ ID NO: 380396 - DNA, 12 bp, Artificial Sequence
  Oligonucleotide primer for the detection of SNP TSC0010431
gatataggaaga

SEQ ID NO: 380397 - DNA, 12 bp, Artificial Sequence
  Oligonucleotide primer for the detection of SNP TSC0007270
atatgtagtagg

SEQ ID NO: 380398 - DNA, 12 bp, Artificial Sequence
  Oligonucleotide primer for the detection of SNP TSC0007270
atatataataaa

SEQ ID NO: 380399 - DNA, 12 bp, Artificial Sequence
  Oligonucleotide primer for the detection of SNP TSC0007270
aatagaaaaagt

SEQ ID NO: 380400 - DNA, 12 bp, Artificial Sequence
  Oligonucleotide primer for the detection of SNP TSC0063810
tgtgaaaattga

SEQ ID NO: 380401 - DNA, 12 bp, Artificial Sequence
  Oligonucleotide primer for the detection of SNP TSC0063811
acctaccaaatt

SEQ ID NO: 380402 - DNA, 12 bp, Artificial Sequence
  Oligonucleotide primer for the detection of SNP TSC0005796
tcacaaaatcta

SEQ ID NO: 380403 - DNA, 12 bp, Artificial Sequence
  Oligonucleotide primer for the detection of SNP TSC0005796
tcacgaaatcta

SEQ ID NO: 380404 - DNA, 12 bp, Artificial Sequence
  Oligonucleotide primer for the detection of SNP TSC0005796
ttttataaaatt

SEQ ID NO: 380405 - DNA, 12 bp, Artificial Sequence
  Oligonucleotide primer for the detection of SNP TSC0005796
cttataaaatca

SEQ ID NO: 380406 - DNA, 12 bp, Artificial Sequence
  Oligonucleotide primer for the detection of SNP TSC0005796
tttacgagattt

SEQ ID NO: 380407 - DNA, 12 bp, Artificial Sequence
  Oligonucleotide primer for the detection of SNP TSC0007102
aacattaaatac

SEQ ID NO: 380408 - DNA, 12 bp, Artificial Sequence
  Oligonucleotide primer for the detection of SNP TSC0007102
gaaaagttataa

SEQ ID NO: 380409 - DNA, 12 bp, Artificial Sequence
  Oligonucleotide primer for the detection of SNP TSC0063814
gaaaataggaag

SEQ ID NO: 380410 - DNA, 12 bp, Artificial Sequence
  Oligonucleotide primer for the detection of SNP TSC0063815
ttttaaccaaat

SEQ ID NO: 380411 - DNA, 12 bp, Artificial Sequence
  Oligonucleotide primer for the detection of SNP TSC0063815
acctttcttaac

SEQ ID NO: 380412 - DNA, 12 bp, Artificial Sequence
  Oligonucleotide primer for the detection of SNP TSC0063815
ttttggttaaat

SEQ ID NO: 380413 - DNA, 12 bp, Artificial Sequence
  Oligonucleotide primer for the detection of SNP TSC0004983
aaaaaattatct

SEQ ID NO: 380414 - DNA, 12 bp, Artificial Sequence
  Oligonucleotide primer for the detection of SNP TSC0063818
aaaataataaac

SEQ ID NO: 380415 - DNA, 12 bp, Artificial Sequence
  Oligonucleotide primer for the detection of SNP TSC0063818
taagtgtttgtg

SEQ ID NO: 380416 - DNA, 12 bp, Artificial Sequence
  Oligonucleotide primer for the detection of SNP TSC0063818
taagcgtttgtg

SEQ ID NO: 380417 - DNA, 12 bp, Artificial Sequence
  Oligonucleotide primer for the detection of SNP TSC0063818
taagtgttcgtg

SEQ ID NO: 380418 - DNA, 12 bp, Artificial Sequence
  Oligonucleotide primer for the detection of SNP TSC0063818
taagcgttcgtg

SEQ ID NO: 380419 - DNA, 12 bp, Artificial Sequence
  Oligonucleotide primer for the detection of SNP TSC0063818
taaacatccata

SEQ ID NO: 380420 - DNA, 12 bp, Artificial Sequence
  Oligonucleotide primer for the detection of SNP TSC0063818
taaacatccgta

SEQ ID NO: 380421 - DNA, 12 bp, Artificial Sequence
  Oligonucleotide primer for the detection of SNP TSC0063818
taaacgtccata

SEQ ID NO: 380422 - DNA, 12 bp, Artificial Sequence
  Oligonucleotide primer for the detection of SNP TSC0063818
taaacgtccgta

SEQ ID NO: 380423 - DNA, 12 bp, Artificial Sequence
  Oligonucleotide primer for the detection of SNP TSC0063818
aaaatgataggt

SEQ ID NO: 380424 - DNA, 12 bp, Artificial Sequence
  Oligonucleotide primer for the detection of SNP TSC0063819
taatttatggtt

SEQ ID NO: 380425 - DNA, 12 bp, Artificial Sequence
  Oligonucleotide primer for the detection of SNP TSC0063819
taatttacggtt

SEQ ID NO: 380426 - DNA, 12 bp, Artificial Sequence
  Oligonucleotide primer for the detection of SNP TSC0063819
taatttatggtc

SEQ ID NO: 380427 - DNA, 12 bp, Artificial Sequence
  Oligonucleotide primer for the detection of SNP TSC0063819
taatttacggtc

SEQ ID NO: 380428 - DNA, 12 bp, Artificial Sequence
  Oligonucleotide primer for the detection of SNP TSC0063819
caacccacgacc

SEQ ID NO: 380429 - DNA, 12 bp, Artificial Sequence
  Oligonucleotide primer for the detection of SNP TSC0063819
aaagggagttgg

SEQ ID NO: 380430 - DNA, 12 bp, Artificial Sequence
  Oligonucleotide primer for the detection of SNP TSC0063820
aactatactcca

SEQ ID NO: 380431 - DNA, 12 bp, Artificial Sequence
  Oligonucleotide primer for the detection of SNP TSC0063821
aaataatctacc

SEQ ID NO: 380432 - DNA, 12 bp, Artificial Sequence
  Oligonucleotide primer for the detection of SNP TSC0063821
ggagggtgagat

SEQ ID NO: 380433 - DNA, 12 bp, Artificial Sequence
  Oligonucleotide primer for the detection of SNP TSC0063821
aggtgatttgtt

SEQ ID NO: 380434 - DNA, 12 bp, Artificial Sequence
  Oligonucleotide primer for the detection of SNP TSC0063821
aggtgatttgtc

SEQ ID NO: 380435 - DNA, 12 bp, Artificial Sequence
  Oligonucleotide primer for the detection of SNP TSC0063822
ataacattttaa

SEQ ID NO: 380436 - DNA, 12 bp, Artificial Sequence
  Oligonucleotide primer for the detection of SNP TSC0063822
atacaaaacaca

SEQ ID NO: 380437 - DNA, 12 bp, Artificial Sequence
  Oligonucleotide primer for the detection of SNP TSC0063823
aaaattttcctt

SEQ ID NO: 380438 - DNA, 12 bp, Artificial Sequence
  Oligonucleotide primer for the detection of SNP TSC0063823
tgatagatgata

SEQ ID NO: 380439 - DNA, 12 bp, Artificial Sequence
  Oligonucleotide primer for the detection of SNP TSC0063824
attacattcttt

SEQ ID NO: 380440 - DNA, 12 bp, Artificial Sequence
  Oligonucleotide primer for the detection of SNP TSC0063824
ttagatggaaaa

SEQ ID NO: 380441 - DNA, 12 bp, Artificial Sequence
  Oligonucleotide primer for the detection of SNP TSC0063824
ttagacggaaaa

SEQ ID NO: 380442 - DNA, 12 bp, Artificial Sequence
  Oligonucleotide primer for the detection of SNP TSC0063825
ttaacaactctc

SEQ ID NO: 380443 - DNA, 12 bp, Artificial Sequence
  Oligonucleotide primer for the detection of SNP TSC0063825
atgtgtgatttt

SEQ ID NO: 380444 - DNA, 12 bp, Artificial Sequence
  Oligonucleotide primer for the detection of SNP TSC0063825
taatatataatc

SEQ ID NO: 380445 - DNA, 12 bp, Artificial Sequence
  Oligonucleotide primer for the detection of SNP TSC0063826
atatacacccat

SEQ ID NO: 380446 - DNA, 12 bp, Artificial Sequence
  Oligonucleotide primer for the detection of SNP TSC0063826
atatacgcccat

SEQ ID NO: 380447 - DNA, 12 bp, Artificial Sequence
  Oligonucleotide primer for the detection of SNP TSC0063826
ggtggatagtgg

SEQ ID NO: 380448 - DNA, 12 bp, Artificial Sequence
  Oligonucleotide primer for the detection of SNP TSC0063828
accaacctctaa

SEQ ID NO: 380449 - DNA, 12 bp, Artificial Sequence
  Oligonucleotide primer for the detection of SNP TSC0063828
atcctatttcta

SEQ ID NO: 380450 - DNA, 12 bp, Artificial Sequence
  Oligonucleotide primer for the detection of SNP TSC0063828
attagtttttgg

SEQ ID NO: 380451 - DNA, 12 bp, Artificial Sequence
  Oligonucleotide primer for the detection of SNP TSC0063829
caaaatcattta

SEQ ID NO: 380452 - DNA, 12 bp, Artificial Sequence
  Oligonucleotide primer for the detection of SNP TSC0063829
gatataataaat

SEQ ID NO: 380453 - DNA, 12 bp, Artificial Sequence
  Oligonucleotide primer for the detection of SNP TSC0007918
tatacataaata

SEQ ID NO: 380454 - DNA, 12 bp, Artificial Sequence
  Oligonucleotide primer for the detection of SNP TSC0007918
tatacgtaaata

SEQ ID NO: 380455 - DNA, 12 bp, Artificial Sequence
  Oligonucleotide primer for the detection of SNP TSC0007918
aatttatgggta

SEQ ID NO: 380456 - DNA, 12 bp, Artificial Sequence
  Oligonucleotide primer for the detection of SNP TSC0063830
tcatctctctct

SEQ ID NO: 380457 - DNA, 12 bp, Artificial Sequence
  Oligonucleotide primer for the detection of SNP TSC0063831
attcacattatt

SEQ ID NO: 380458 - DNA, 12 bp, Artificial Sequence
  Oligonucleotide primer for the detection of SNP TSC0063831
aggaaaatgata

SEQ ID NO: 380459 - DNA, 12 bp, Artificial Sequence
  Oligonucleotide primer for the detection of SNP TSC0063833
ctatataccaaa

SEQ ID NO: 380460 - DNA, 12 bp, Artificial Sequence
  Oligonucleotide primer for the detection of SNP TSC0063833
tacttcctctac

SEQ ID NO: 380461 - DNA, 12 bp, Artificial Sequence
  Oligonucleotide primer for the detection of SNP TSC0063833
ttatgtgttaga

SEQ ID NO: 380462 - DNA, 12 bp, Artificial Sequence
  Oligonucleotide primer for the detection of SNP TSC0063834
aacatctaacac

SEQ ID NO: 380463 - DNA, 12 bp, Artificial Sequence
  Oligonucleotide primer for the detection of SNP TSC0063834
aacgtctaacac

SEQ ID NO: 380464 - DNA, 12 bp, Artificial Sequence
  Oligonucleotide primer for the detection of SNP TSC0063834
ttgattatttag

SEQ ID NO: 380465 - DNA, 12 bp, Artificial Sequence
  Oligonucleotide primer for the detection of SNP TSC0063836
ccactccatctc

SEQ ID NO: 380466 - DNA, 12 bp, Artificial Sequence
  Oligonucleotide primer for the detection of SNP TSC0063836
tgtggatgtaga

SEQ ID NO: 380467 - DNA, 12 bp, Artificial Sequence
  Oligonucleotide primer for the detection of SNP TSC0001433
aacactttcact

SEQ ID NO: 380468 - DNA, 12 bp, Artificial Sequence
  Oligonucleotide primer for the detection of SNP TSC0001434
ataacatattca

SEQ ID NO: 380469 - DNA, 12 bp, Artificial Sequence
  Oligonucleotide primer for the detection of SNP TSC0001434
aagaaaattttt

SEQ ID NO: 380470 - DNA, 12 bp, Artificial Sequence
  Oligonucleotide primer for the detection of SNP TSC0001435
aaacattaccac

SEQ ID NO: 380471 - DNA, 12 bp, Artificial Sequence
  Oligonucleotide primer for the detection of SNP TSC0001435
gtagttgattta

SEQ ID NO: 380472 - DNA, 12 bp, Artificial Sequence
  Oligonucleotide primer for the detection of SNP TSC0008607
atttctcttatt

SEQ ID NO: 380473 - DNA, 12 bp, Artificial Sequence
  Oligonucleotide primer for the detection of SNP TSC0063841
tttaattttggg

SEQ ID NO: 380474 - DNA, 12 bp, Artificial Sequence
  Oligonucleotide primer for the detection of SNP TSC0000488
accatcatttct

SEQ ID NO: 380475 - DNA, 12 bp, Artificial Sequence
  Oligonucleotide primer for the detection of SNP TSC0000488
attagttataag

SEQ ID NO: 380476 - DNA, 12 bp, Artificial Sequence
  Oligonucleotide primer for the detection of SNP TSC0000489
attattcattcc

SEQ ID NO: 380477 - DNA, 12 bp, Artificial Sequence
  Oligonucleotide primer for the detection of SNP TSC0000490
aaactactttta

SEQ ID NO: 380478 - DNA, 12 bp, Artificial Sequence
  Oligonucleotide primer for the detection of SNP TSC0000490
tttattgtgttt

SEQ ID NO: 380479 - DNA, 12 bp, Artificial Sequence
  Oligonucleotide primer for the detection of SNP TSC0000490
tttattatatcc

SEQ ID NO: 380480 - DNA, 12 bp, Artificial Sequence
  Oligonucleotide primer for the detection of SNP TSC0000490
agattgtttttg

SEQ ID NO: 380481 - DNA, 12 bp, Artificial Sequence
  Oligonucleotide primer for the detection of SNP TSC0001052
gtggagttattt

SEQ ID NO: 380482 - DNA, 12 bp, Artificial Sequence
  Oligonucleotide primer for the detection of SNP TSC0001052
ataaaaccattt

SEQ ID NO: 380483 - DNA, 12 bp, Artificial Sequence
  Oligonucleotide primer for the detection of SNP TSC0001053
ctaacaaaataa

SEQ ID NO: 380484 - DNA, 12 bp, Artificial Sequence
  Oligonucleotide primer for the detection of SNP TSC0001053
agatattaaaat

SEQ ID NO: 380485 - DNA, 12 bp, Artificial Sequence
  Oligonucleotide primer for the detection of SNP TSC0001053
tttaataaagta

SEQ ID NO: 380486 - DNA, 12 bp, Artificial Sequence
  Oligonucleotide primer for the detection of SNP TSC0005812
aatatcacacca

SEQ ID NO: 380487 - DNA, 12 bp, Artificial Sequence
  Oligonucleotide primer for the detection of SNP TSC0005812
ttataacctaac

SEQ ID NO: 380488 - DNA, 12 bp, Artificial Sequence
  Oligonucleotide primer for the detection of SNP TSC0005813
aaaattatatta

SEQ ID NO: 380489 - DNA, 12 bp, Artificial Sequence
  Oligonucleotide primer for the detection of SNP TSC0005813
ttattatagttt

SEQ ID NO: 380490 - DNA, 12 bp, Artificial Sequence
  Oligonucleotide primer for the detection of SNP TSC0005813
aaaattgtatta

SEQ ID NO: 380491 - DNA, 12 bp, Artificial Sequence
  Oligonucleotide primer for the detection of SNP TSC0005814
aaaaactttccc

SEQ ID NO: 380492 - DNA, 12 bp, Artificial Sequence
  Oligonucleotide primer for the detection of SNP TSC0005814
aagagaatatag

SEQ ID NO: 380493 - DNA, 12 bp, Artificial Sequence
  Oligonucleotide primer for the detection of SNP TSC0005815
aaaatataaacc

SEQ ID NO: 380494 - DNA, 12 bp, Artificial Sequence
  Oligonucleotide primer for the detection of SNP TSC0005815
gtttttgttttg

SEQ ID NO: 380495 - DNA, 12 bp, Artificial Sequence
  Oligonucleotide primer for the detection of SNP TSC0005815
atctctattcta

SEQ ID NO: 380496 - DNA, 12 bp, Artificial Sequence
  Oligonucleotide primer for the detection of SNP TSC0005815
aaagtataaatt

SEQ ID NO: 380497 - DNA, 12 bp, Artificial Sequence
  Oligonucleotide primer for the detection of SNP TSC0009840
gaagtgtagtgg

SEQ ID NO: 380498 - DNA, 12 bp, Artificial Sequence
  Oligonucleotide primer for the detection of SNP TSC0009840
tgagttgtggtt

SEQ ID NO: 380499 - DNA, 12 bp, Artificial Sequence
  Oligonucleotide primer for the detection of SNP TSC0010426
acattaataaac

SEQ ID NO: 380500 - DNA, 12 bp, Artificial Sequence
  Oligonucleotide primer for the detection of SNP TSC0010426
tgttgtttgtga

SEQ ID NO: 380501 - DNA, 12 bp, Artificial Sequence
  Oligonucleotide primer for the detection of SNP TSC0000393
ttttgaaatgaa

SEQ ID NO: 380502 - DNA, 12 bp, Artificial Sequence
  Oligonucleotide primer for the detection of SNP TSC0063851
attttaggtgat

SEQ ID NO: 380503 - DNA, 12 bp, Artificial Sequence
  Oligonucleotide primer for the detection of SNP TSC0063853
tacctataatac

SEQ ID NO: 380504 - DNA, 12 bp, Artificial Sequence
  Oligonucleotide primer for the detection of SNP TSC0063853
tttttcgagtaa

SEQ ID NO: 380505 - DNA, 12 bp, Artificial Sequence
  Oligonucleotide primer for the detection of SNP TSC0063855
acccaaacaaca

SEQ ID NO: 380506 - DNA, 12 bp, Artificial Sequence
  Oligonucleotide primer for the detection of SNP TSC0063855
agtttagtaggt

SEQ ID NO: 380507 - DNA, 12 bp, Artificial Sequence
  Oligonucleotide primer for the detection of SNP TSC0063856
cttcccatccca

SEQ ID NO: 380508 - DNA, 12 bp, Artificial Sequence
  Oligonucleotide primer for the detection of SNP TSC0063856
aaggatgataat

SEQ ID NO: 380509 - DNA, 12 bp, Artificial Sequence
  Oligonucleotide primer for the detection of SNP TSC0063857
acatttccctaa

SEQ ID NO: 380510 - DNA, 12 bp, Artificial Sequence
  Oligonucleotide primer for the detection of SNP TSC0063857
ccctaactatac

SEQ ID NO: 380511 - DNA, 12 bp, Artificial Sequence
  Oligonucleotide primer for the detection of SNP TSC0063858
aattctttctcc

SEQ ID NO: 380512 - DNA, 12 bp, Artificial Sequence
  Oligonucleotide primer for the detection of SNP TSC0063859
atcaaaacaaat

SEQ ID NO: 380513 - DNA, 12 bp, Artificial Sequence
  Oligonucleotide primer for the detection of SNP TSC0063859
aaagagaaagaa

SEQ ID NO: 380514 - DNA, 12 bp, Artificial Sequence
  Oligonucleotide primer for the detection of SNP TSC0007971
ttcttttttatt

SEQ ID NO: 380515 - DNA, 12 bp, Artificial Sequence
  Oligonucleotide primer for the detection of SNP TSC0007971
tgaagtggtaag

SEQ ID NO: 380516 - DNA, 12 bp, Artificial Sequence
  Oligonucleotide primer for the detection of SNP TSC0063860
ttccaaatttaa

SEQ ID NO: 380517 - DNA, 12 bp, Artificial Sequence
  Oligonucleotide primer for the detection of SNP TSC0063860
gttttttaaggt

SEQ ID NO: 380518 - DNA, 12 bp, Artificial Sequence
  Oligonucleotide primer for the detection of SNP TSC0063860
attcctcaaaac

SEQ ID NO: 380519 - DNA, 12 bp, Artificial Sequence
  Oligonucleotide primer for the detection of SNP TSC0063860
ttttaagtttag

SEQ ID NO: 380520 - DNA, 12 bp, Artificial Sequence
  Oligonucleotide primer for the detection of SNP TSC0000481
aaccacaatcct

SEQ ID NO: 380521 - DNA, 12 bp, Artificial Sequence
  Oligonucleotide primer for the detection of SNP TSC0000481
aaccgcaatcct

SEQ ID NO: 380522 - DNA, 12 bp, Artificial Sequence
  Oligonucleotide primer for the detection of SNP TSC0000481
agttagagtttg

SEQ ID NO: 380523 - DNA, 12 bp, Artificial Sequence
  Oligonucleotide primer for the detection of SNP TSC0000481
agttagagttcg

SEQ ID NO: 380524 - DNA, 12 bp, Artificial Sequence
  Oligonucleotide primer for the detection of SNP TSC0063861
acttcttacata

SEQ ID NO: 380525 - DNA, 12 bp, Artificial Sequence
  Oligonucleotide primer for the detection of SNP TSC0063861
ggtagtttagtt

SEQ ID NO: 380526 - DNA, 12 bp, Artificial Sequence
  Oligonucleotide primer for the detection of SNP TSC0063861
aacaacctaatc

SEQ ID NO: 380527 - DNA, 12 bp, Artificial Sequence
  Oligonucleotide primer for the detection of SNP TSC0000454
gggagaaatgta

SEQ ID NO: 380528 - DNA, 12 bp, Artificial Sequence
  Oligonucleotide primer for the detection of SNP TSC0063862
ttttacatttct

SEQ ID NO: 380529 - DNA, 12 bp, Artificial Sequence
  Oligonucleotide primer for the detection of SNP TSC0063862
tatatagtaagg

SEQ ID NO: 380530 - DNA, 12 bp, Artificial Sequence
  Oligonucleotide primer for the detection of SNP TSC0063865
ttatacattata

SEQ ID NO: 380531 - DNA, 12 bp, Artificial Sequence
  Oligonucleotide primer for the detection of SNP TSC0063865
tggagataaatt

SEQ ID NO: 380532 - DNA, 12 bp, Artificial Sequence
  Oligonucleotide primer for the detection of SNP TSC0063865
cggagataaatt

SEQ ID NO: 380533 - DNA, 12 bp, Artificial Sequence
  Oligonucleotide primer for the detection of SNP TSC0063865
caaaaataaatc

SEQ ID NO: 380534 - DNA, 12 bp, Artificial Sequence
  Oligonucleotide primer for the detection of SNP TSC0063865
cgaaaataaatc

SEQ ID NO: 380535 - DNA, 12 bp, Artificial Sequence
  Oligonucleotide primer for the detection of SNP TSC0063865
ttgtatattata

SEQ ID NO: 380536 - DNA, 12 bp, Artificial Sequence
  Oligonucleotide primer for the detection of SNP TSC0063866
aaaaccaaatat

SEQ ID NO: 380537 - DNA, 12 bp, Artificial Sequence
  Oligonucleotide primer for the detection of SNP TSC0063866
ttaagaattatg

SEQ ID NO: 380538 - DNA, 12 bp, Artificial Sequence
  Oligonucleotide primer for the detection of SNP TSC0063866
ttaagaattacg

SEQ ID NO: 380539 - DNA, 12 bp, Artificial Sequence
  Oligonucleotide primer for the detection of SNP TSC0000358
attatattcaac

SEQ ID NO: 380540 - DNA, 12 bp, Artificial Sequence
  Oligonucleotide primer for the detection of SNP TSC0000358
cccctaaaatat

SEQ ID NO: 380541 - DNA, 12 bp, Artificial Sequence
  Oligonucleotide primer for the detection of SNP TSC0063867
cttcaaaactta

SEQ ID NO: 380542 - DNA, 12 bp, Artificial Sequence
  Oligonucleotide primer for the detection of SNP TSC0063867
aatgatataaaa

SEQ ID NO: 380543 - DNA, 12 bp, Artificial Sequence
  Oligonucleotide primer for the detection of SNP TSC0063868
taactacaacaa

SEQ ID NO: 380544 - DNA, 12 bp, Artificial Sequence
  Oligonucleotide primer for the detection of SNP TSC0063868
agtttgttgtgt

SEQ ID NO: 380545 - DNA, 12 bp, Artificial Sequence
  Oligonucleotide primer for the detection of SNP TSC0063868
aatttactatac

SEQ ID NO: 380546 - DNA, 12 bp, Artificial Sequence
  Oligonucleotide primer for the detection of SNP TSC0063868
agttataatagt

SEQ ID NO: 380547 - DNA, 12 bp, Artificial Sequence
  Oligonucleotide primer for the detection of SNP TSC0063868
agttataatagc

SEQ ID NO: 380548 - DNA, 12 bp, Artificial Sequence
  Oligonucleotide primer for the detection of SNP TSC0063869
gggtgataaagt

SEQ ID NO: 380549 - DNA, 12 bp, Artificial Sequence
  Oligonucleotide primer for the detection of SNP TSC0063869
aaataacaaaat

SEQ ID NO: 380550 - DNA, 12 bp, Artificial Sequence
  Oligonucleotide primer for the detection of SNP TSC0063869
tggaggagatag

SEQ ID NO: 380551 - DNA, 12 bp, Artificial Sequence
  Oligonucleotide primer for the detection of SNP TSC0001026
atatttcccatc

SEQ ID NO: 380552 - DNA, 12 bp, Artificial Sequence
  Oligonucleotide primer for the detection of SNP TSC0001026
aagtatagaaaa

SEQ ID NO: 380553 - DNA, 12 bp, Artificial Sequence
  Oligonucleotide primer for the detection of SNP TSC0063873
cctaaatccaat

SEQ ID NO: 380554 - DNA, 12 bp, Artificial Sequence
  Oligonucleotide primer for the detection of SNP TSC0001554
tgtgtagtattt

SEQ ID NO: 380555 - DNA, 12 bp, Artificial Sequence
  Oligonucleotide primer for the detection of SNP TSC0001554
atatataacacc

SEQ ID NO: 380556 - DNA, 12 bp, Artificial Sequence
  Oligonucleotide primer for the detection of SNP TSC0001554
agagagagtggg

SEQ ID NO: 380557 - DNA, 12 bp, Artificial Sequence
  Oligonucleotide primer for the detection of SNP TSC0001554
agagagagcggg

SEQ ID NO: 380558 - DNA, 12 bp, Artificial Sequence
  Oligonucleotide primer for the detection of SNP TSC0063874
tataagaaaaga

SEQ ID NO: 380559 - DNA, 12 bp, Artificial Sequence
  Oligonucleotide primer for the detection of SNP TSC0063875
atatccaaaata

SEQ ID NO: 380560 - DNA, 12 bp, Artificial Sequence
  Oligonucleotide primer for the detection of SNP TSC0063875
actaataccata

SEQ ID NO: 380561 - DNA, 12 bp, Artificial Sequence
  Oligonucleotide primer for the detection of SNP TSC0063875
gtatttaaaatg

SEQ ID NO: 380562 - DNA, 12 bp, Artificial Sequence
  Oligonucleotide primer for the detection of SNP TSC0063876
tggtttgtgtgt

SEQ ID NO: 380563 - DNA, 12 bp, Artificial Sequence
  Oligonucleotide primer for the detection of SNP TSC0063876
ctaatctatata

SEQ ID NO: 380564 - DNA, 12 bp, Artificial Sequence
  Oligonucleotide primer for the detection of SNP TSC0063876
tggtattagtat

SEQ ID NO: 380565 - DNA, 12 bp, Artificial Sequence
  Oligonucleotide primer for the detection of SNP TSC0000761
atgtttttcgta

SEQ ID NO: 380566 - DNA, 12 bp, Artificial Sequence
  Oligonucleotide primer for the detection of SNP TSC0000075
tttttctactcc

SEQ ID NO: 380567 - DNA, 12 bp, Artificial Sequence
  Oligonucleotide primer for the detection of SNP TSC0000075
tgttgtattttt

SEQ ID NO: 380568 - DNA, 12 bp, Artificial Sequence
  Oligonucleotide primer for the detection of SNP TSC0000075
aaatactacatc

SEQ ID NO: 380569 - DNA, 12 bp, Artificial Sequence
  Oligonucleotide primer for the detection of SNP TSC0063877
tacaacactcaa

SEQ ID NO: 380570 - DNA, 12 bp, Artificial Sequence
  Oligonucleotide primer for the detection of SNP TSC0063877
acaccccaaata

SEQ ID NO: 380571 - DNA, 12 bp, Artificial Sequence
  Oligonucleotide primer for the detection of SNP TSC0063877
tgtagtatttaa

SEQ ID NO: 380572 - DNA, 12 bp, Artificial Sequence
  Oligonucleotide primer for the detection of SNP TSC0063878
aaataccattat

SEQ ID NO: 380573 - DNA, 12 bp, Artificial Sequence
  Oligonucleotide primer for the detection of SNP TSC0063878
aaataccgttat

SEQ ID NO: 380574 - DNA, 12 bp, Artificial Sequence
  Oligonucleotide primer for the detection of SNP TSC0063878
taggttttgaga

SEQ ID NO: 380575 - DNA, 12 bp, Artificial Sequence
  Oligonucleotide primer for the detection of SNP TSC0063878
taggtttcgaga

SEQ ID NO: 380576 - DNA, 12 bp, Artificial Sequence
  Oligonucleotide primer for the detection of SNP TSC0001248
tctcaattctac

SEQ ID NO: 380577 - DNA, 12 bp, Artificial Sequence
  Oligonucleotide primer for the detection of SNP TSC0001248
ttaaattaatgg

SEQ ID NO: 380578 - DNA, 12 bp, Artificial Sequence
  Oligonucleotide primer for the detection of SNP TSC0001137
cctactacatct

SEQ ID NO: 380579 - DNA, 12 bp, Artificial Sequence
  Oligonucleotide primer for the detection of SNP TSC0001137
gtgtgttaggta

SEQ ID NO: 380580 - DNA, 12 bp, Artificial Sequence
  Oligonucleotide primer for the detection of SNP TSC0063879
caccaatccata

SEQ ID NO: 380581 - DNA, 12 bp, Artificial Sequence
  Oligonucleotide primer for the detection of SNP TSC0063879
caccgatccata

SEQ ID NO: 380582 - DNA, 12 bp, Artificial Sequence
  Oligonucleotide primer for the detection of SNP TSC0063879
tttttagaggtt

SEQ ID NO: 380583 - DNA, 12 bp, Artificial Sequence
  Oligonucleotide primer for the detection of SNP TSC0063879
attggtttatat

SEQ ID NO: 380584 - DNA, 12 bp, Artificial Sequence
  Oligonucleotide primer for the detection of SNP TSC0063879
atcggtttatat

SEQ ID NO: 380585 - DNA, 12 bp, Artificial Sequence
  Oligonucleotide primer for the detection of SNP TSC0063880
atcctacatata

SEQ ID NO: 380586 - DNA, 12 bp, Artificial Sequence
  Oligonucleotide primer for the detection of SNP TSC0063880
aagttttacggt

SEQ ID NO: 380587 - DNA, 12 bp, Artificial Sequence
  Oligonucleotide primer for the detection of SNP TSC0063880
aaattccacaat

SEQ ID NO: 380588 - DNA, 12 bp, Artificial Sequence
  Oligonucleotide primer for the detection of SNP TSC0063880
aaattccacgat

SEQ ID NO: 380589 - DNA, 12 bp, Artificial Sequence
  Oligonucleotide primer for the detection of SNP TSC0063881
tcttaaatatat

SEQ ID NO: 380590 - DNA, 12 bp, Artificial Sequence
  Oligonucleotide primer for the detection of SNP TSC0063881
tgttgttataag

SEQ ID NO: 380591 - DNA, 12 bp, Artificial Sequence
  Oligonucleotide primer for the detection of SNP TSC0063882
aaacccccaccc

SEQ ID NO: 380592 - DNA, 12 bp, Artificial Sequence
  Oligonucleotide primer for the detection of SNP TSC0063883
ttagtaggtaaa

SEQ ID NO: 380593 - DNA, 12 bp, Artificial Sequence
  Oligonucleotide primer for the detection of SNP TSC0063883
ccaataaacaaa

SEQ ID NO: 380594 - DNA, 12 bp, Artificial Sequence
  Oligonucleotide primer for the detection of SNP TSC0063886
tattacaattat

SEQ ID NO: 380595 - DNA, 12 bp, Artificial Sequence
  Oligonucleotide primer for the detection of SNP TSC0063887
atctatttaaaa

SEQ ID NO: 380596 - DNA, 12 bp, Artificial Sequence
  Oligonucleotide primer for the detection of SNP TSC0063887
tattttcggtaa

SEQ ID NO: 380597 - DNA, 12 bp, Artificial Sequence
  Oligonucleotide primer for the detection of SNP TSC0063887
ctcccaacaaaa

SEQ ID NO: 380598 - DNA, 12 bp, Artificial Sequence
  Oligonucleotide primer for the detection of SNP TSC0063887
ctcccgacaaaa

SEQ ID NO: 380599 - DNA, 12 bp, Artificial Sequence
  Oligonucleotide primer for the detection of SNP TSC0063887
atttgtttaaga

SEQ ID NO: 380600 - DNA, 12 bp, Artificial Sequence
  Oligonucleotide primer for the detection of SNP TSC0063889
atctcaatactt

SEQ ID NO: 380601 - DNA, 12 bp, Artificial Sequence
  Oligonucleotide primer for the detection of SNP TSC0063889
tcctacctcgac

SEQ ID NO: 380602 - DNA, 12 bp, Artificial Sequence
  Oligonucleotide primer for the detection of SNP TSC0063890
acccaatactat

SEQ ID NO: 380603 - DNA, 12 bp, Artificial Sequence
  Oligonucleotide primer for the detection of SNP TSC0063890
agttatttttga

SEQ ID NO: 380604 - DNA, 12 bp, Artificial Sequence
  Oligonucleotide primer for the detection of SNP TSC0063890
atttagtattat

SEQ ID NO: 380605 - DNA, 12 bp, Artificial Sequence
  Oligonucleotide primer for the detection of SNP TSC0063891
acctataatctc

SEQ ID NO: 380606 - DNA, 12 bp, Artificial Sequence
  Oligonucleotide primer for the detection of SNP TSC0063891
gcctataatctc

SEQ ID NO: 380607 - DNA, 12 bp, Artificial Sequence
  Oligonucleotide primer for the detection of SNP TSC0063893
cctaacctaatt

SEQ ID NO: 380608 - DNA, 12 bp, Artificial Sequence
  Oligonucleotide primer for the detection of SNP TSC0063893
aaataatgttat

SEQ ID NO: 380609 - DNA, 12 bp, Artificial Sequence
  Oligonucleotide primer for the detection of SNP TSC0063893
aaacaatatcat

SEQ ID NO: 380610 - DNA, 12 bp, Artificial Sequence
  Oligonucleotide primer for the detection of SNP TSC0063894
acctctacctat

SEQ ID NO: 380611 - DNA, 12 bp, Artificial Sequence
  Oligonucleotide primer for the detection of SNP TSC0063894
gagttattggta

SEQ ID NO: 380612 - DNA, 12 bp, Artificial Sequence
  Oligonucleotide primer for the detection of SNP TSC0063894
aaactactaaca

SEQ ID NO: 380613 - DNA, 12 bp, Artificial Sequence
  Oligonucleotide primer for the detection of SNP TSC0063895
tatttaacaaca

SEQ ID NO: 380614 - DNA, 12 bp, Artificial Sequence
  Oligonukleotid-Primer
ggtagaggttag

SEQ ID NO: 380615 - DNA, 12 bp, Artificial Sequence
  Oligonucleotide primer for the detection of SNP TSC0063896
tttaattaggtt

SEQ ID NO: 380616 - DNA, 12 bp, Artificial Sequence
  Oligonucleotide primer for the detection of SNP TSC0063896
tctttaattaaa

SEQ ID NO: 380617 - DNA, 12 bp, Artificial Sequence
  Oligonucleotide primer for the detection of SNP TSC0063897
tcctaacacttt

SEQ ID NO: 380618 - DNA, 12 bp, Artificial Sequence
  Oligonucleotide primer for the detection of SNP TSC0063898
actaattttcat

SEQ ID NO: 380619 - DNA, 12 bp, Artificial Sequence
  Oligonucleotide primer for the detection of SNP TSC0063898
tataaatataga

SEQ ID NO: 380620 - DNA, 12 bp, Artificial Sequence
  Oligonucleotide primer for the detection of SNP TSC0063899
ccaaaattacta

SEQ ID NO: 380621 - DNA, 12 bp, Artificial Sequence
  Oligonucleotide primer for the detection of SNP TSC0063899
ccgaaattacta

SEQ ID NO: 380622 - DNA, 12 bp, Artificial Sequence
  Oligonucleotide primer for the detection of SNP TSC0063899
ttatgtttgaat

SEQ ID NO: 380623 - DNA, 12 bp, Artificial Sequence
  Oligonucleotide primer for the detection of SNP TSC0063899
catacctaaata

SEQ ID NO: 380624 - DNA, 12 bp, Artificial Sequence
  Oligonucleotide primer for the detection of SNP TSC0063899
ttggagttgttg

SEQ ID NO: 380625 - DNA, 12 bp, Artificial Sequence
  Oligonucleotide primer for the detection of SNP TSC0063899
tcggagttgttg

SEQ ID NO: 380626 - DNA, 12 bp, Artificial Sequence
  Oligonukleotid-Primer
acaccacttccc

SEQ ID NO: 380627 - DNA, 12 bp, Artificial Sequence
  Oligonucleotide primer for the detection of SNP TSC0063900
ttttaggtttga

SEQ ID NO: 380628 - DNA, 12 bp, Artificial Sequence
  Oligonucleotide primer for the detection of SNP TSC0063901
tcttttaatcat

SEQ ID NO: 380629 - DNA, 12 bp, Artificial Sequence
  Oligonucleotide primer for the detection of SNP TSC0063901
aagggaagttaa

SEQ ID NO: 380630 - DNA, 12 bp, Artificial Sequence
  Oligonukleotid-Primer
tattttataacc

SEQ ID NO: 380631 - DNA, 12 bp, Artificial Sequence
  Oligonucleotide primer for the detection of SNP TSC0063902
cttattacaaat

SEQ ID NO: 380632 - DNA, 12 bp, Artificial Sequence
  Oligonucleotide primer for the detection of SNP TSC0063902
tattttatggtc

SEQ ID NO: 380633 - DNA, 12 bp, Artificial Sequence
  Oligonucleotide primer for the detection of SNP TSC0063903
catacatctaaa

SEQ ID NO: 380634 - DNA, 12 bp, Artificial Sequence
  Oligonucleotide primer for the detection of SNP TSC0063903
tttgttttaagg

SEQ ID NO: 380635 - DNA, 12 bp, Artificial Sequence
  Oligonucleotide primer for the detection of SNP TSC0063903
cttatttcaaaa

SEQ ID NO: 380636 - DNA, 12 bp, Artificial Sequence
  Oligonucleotide primer for the detection of SNP TSC0063903
tatatatttgaa

SEQ ID NO: 380637 - DNA, 12 bp, Artificial Sequence
  Oligonucleotide primer for the detection of SNP TSC0005425
ttaccttaactc

SEQ ID NO: 380638 - DNA, 12 bp, Artificial Sequence
  Oligonucleotide primer for the detection of SNP TSC0063911
catatataaaac

SEQ ID NO: 380639 - DNA, 12 bp, Artificial Sequence
  Oligonucleotide primer for the detection of SNP TSC0063911
atttgggttttg

SEQ ID NO: 380640 - DNA, 12 bp, Artificial Sequence
  Oligonucleotide primer for the detection of SNP TSC0063911
acttaaatctta

SEQ ID NO: 380641 - DNA, 12 bp, Artificial Sequence
  Oligonucleotide primer for the detection of SNP TSC0063911
tatatgtgaaat

SEQ ID NO: 380642 - DNA, 12 bp, Artificial Sequence
  Oligonucleotide primer for the detection of SNP TSC0063913
aagttttatacg

SEQ ID NO: 380643 - DNA, 12 bp, Artificial Sequence
  Oligonucleotide primer for the detection of SNP TSC0063913
aaactccacaca

SEQ ID NO: 380644 - DNA, 12 bp, Artificial Sequence
  Oligonucleotide primer for the detection of SNP TSC0063913
aaactccacacg

SEQ ID NO: 380645 - DNA, 12 bp, Artificial Sequence
  Oligonucleotide primer for the detection of SNP TSC0063913
ggataaatagtt

SEQ ID NO: 380646 - DNA, 12 bp, Artificial Sequence
  Oligonucleotide primer for the detection of SNP TSC0063914
ttagaatttaaa

SEQ ID NO: 380647 - DNA, 12 bp, Artificial Sequence
  Oligonucleotide primer for the detection of SNP TSC0007686
taaaattccctc

SEQ ID NO: 380648 - DNA, 12 bp, Artificial Sequence
  Oligonucleotide primer for the detection of SNP TSC0007686
aattgaatttta

SEQ ID NO: 380649 - DNA, 12 bp, Artificial Sequence
  Oligonucleotide primer for the detection of SNP TSC0007686
aatcgaatttta

SEQ ID NO: 380650 - DNA, 12 bp, Artificial Sequence
  Oligonucleotide primer for the detection of SNP TSC0063915
tactacaaataa

SEQ ID NO: 380651 - DNA, 12 bp, Artificial Sequence
  Oligonucleotide primer for the detection of SNP TSC0063915
actcccttcacc

SEQ ID NO: 380652 - DNA, 12 bp, Artificial Sequence
  Oligonucleotide primer for the detection of SNP TSC0063915
gttataagtgat

SEQ ID NO: 380653 - DNA, 12 bp, Artificial Sequence
  Oligonucleotide primer for the detection of SNP TSC0063915
gttataagtgac

SEQ ID NO: 380654 - DNA, 12 bp, Artificial Sequence
  Oligonucleotide primer for the detection of SNP TSC0063916
ttctcattcatc

SEQ ID NO: 380655 - DNA, 12 bp, Artificial Sequence
  Oligonucleotide primer for the detection of SNP TSC0063918
aaattcattttt

SEQ ID NO: 380656 - DNA, 12 bp, Artificial Sequence
  Oligonucleotide primer for the detection of SNP TSC0063918
atttattgttag

SEQ ID NO: 380657 - DNA, 12 bp, Artificial Sequence
  Oligonucleotide primer for the detection of SNP TSC0063919
aattattacatc

SEQ ID NO: 380658 - DNA, 12 bp, Artificial Sequence
  Oligonucleotide primer for the detection of SNP TSC0063919
ttaaatctttta

SEQ ID NO: 380659 - DNA, 12 bp, Artificial Sequence
  Oligonucleotide primer for the detection of SNP TSC0063920
ttttgtagtttg

SEQ ID NO: 380660 - DNA, 12 bp, Artificial Sequence
  Oligonucleotide primer for the detection of SNP TSC0063920
tttcgtagtttg

SEQ ID NO: 380661 - DNA, 12 bp, Artificial Sequence
  Oligonucleotide primer for the detection of SNP TSC0063921
ccctccttacta

SEQ ID NO: 380662 - DNA, 12 bp, Artificial Sequence
  Oligonucleotide primer for the detection of SNP TSC0063921
tgaattagaatt

SEQ ID NO: 380663 - DNA, 12 bp, Artificial Sequence
  Oligonucleotide primer for the detection of SNP TSC0063922
ggtaggttatta

SEQ ID NO: 380664 - DNA, 12 bp, Artificial Sequence
  Oligonucleotide primer for the detection of SNP TSC0063922
aataaatcatta

SEQ ID NO: 380665 - DNA, 12 bp, Artificial Sequence
  Oligonucleotide primer for the detection of SNP TSC0063922
atgaagttatgt

SEQ ID NO: 380666 - DNA, 12 bp, Artificial Sequence
  Oligonucleotide primer for the detection of SNP TSC0063923
attgaaaagtag

SEQ ID NO: 380667 - DNA, 12 bp, Artificial Sequence
  Oligonucleotide primer for the detection of SNP TSC0063924
ttattattacta

SEQ ID NO: 380668 - DNA, 12 bp, Artificial Sequence
  Oligonucleotide primer for the detection of SNP TSC0063924
ttttcgattttt

SEQ ID NO: 380669 - DNA, 12 bp, Artificial Sequence
  Oligonucleotide primer for the detection of SNP TSC0063924
ttttcaatttcc

SEQ ID NO: 380670 - DNA, 12 bp, Artificial Sequence
  Oligonucleotide primer for the detection of SNP TSC0063924
ttttcgatttcc

SEQ ID NO: 380671 - DNA, 12 bp, Artificial Sequence
  Oligonucleotide primer for the detection of SNP TSC0008131
acaaaaccctac

SEQ ID NO: 380672 - DNA, 12 bp, Artificial Sequence
  Oligonucleotide primer for the detection of SNP TSC0008131
attatatttgag

SEQ ID NO: 380673 - DNA, 12 bp, Artificial Sequence
  Oligonucleotide primer for the detection of SNP TSC0008131
atcacacctaaa

SEQ ID NO: 380674 - DNA, 12 bp, Artificial Sequence
  Oligonucleotide primer for the detection of SNP TSC0008131
gtaaggttttgt

SEQ ID NO: 380675 - DNA, 12 bp, Artificial Sequence
  Oligonucleotide primer for the detection of SNP TSC0063927
tataaaacatac

SEQ ID NO: 380676 - DNA, 12 bp, Artificial Sequence
  Oligonucleotide primer for the detection of SNP TSC0063927
gtagttatggta

SEQ ID NO: 380677 - DNA, 12 bp, Artificial Sequence
  Oligonucleotide primer for the detection of SNP TSC0063928
acccatatttat

SEQ ID NO: 380678 - DNA, 12 bp, Artificial Sequence
  Oligonucleotide primer for the detection of SNP TSC0063928
attgtgataatg

SEQ ID NO: 380679 - DNA, 12 bp, Artificial Sequence
  Oligonucleotide primer for the detection of SNP TSC0063929
taaaactcaaca

SEQ ID NO: 380680 - DNA, 12 bp, Artificial Sequence
  Oligonucleotide primer for the detection of SNP TSC0063929
catccaaaattt

SEQ ID NO: 380681 - DNA, 12 bp, Artificial Sequence
  Oligonucleotide primer for the detection of SNP TSC0063930
gtttaatataag

SEQ ID NO: 380682 - DNA, 12 bp, Artificial Sequence
  Oligonucleotide primer for the detection of SNP TSC0063930
cctaatataaaa

SEQ ID NO: 380683 - DNA, 12 bp, Artificial Sequence
  Oligonucleotide primer for the detection of SNP TSC0063930
ggtatatgagtt

SEQ ID NO: 380684 - DNA, 12 bp, Artificial Sequence
  Oligonucleotide primer for the detection of SNP TSC0063931
attccttctaac

SEQ ID NO: 380685 - DNA, 12 bp, Artificial Sequence
  Oligonucleotide primer for the detection of SNP TSC0063931
aaaaattttgga

SEQ ID NO: 380686 - DNA, 12 bp, Artificial Sequence
  Oligonucleotide primer for the detection of SNP TSC0063932
tactcaatactt

SEQ ID NO: 380687 - DNA, 12 bp, Artificial Sequence
  Oligonucleotide primer for the detection of SNP TSC0008685
aaatataacgtt

SEQ ID NO: 380688 - DNA, 12 bp, Artificial Sequence
  Oligonucleotide primer for the detection of SNP TSC0008685
taaaacacaaca

SEQ ID NO: 380689 - DNA, 12 bp, Artificial Sequence
  Oligonucleotide primer for the detection of SNP TSC0008685
taaaacacaacg

SEQ ID NO: 380690 - DNA, 12 bp, Artificial Sequence
  Oligonucleotide primer for the detection of SNP TSC0008685
ggaggggagtgg

SEQ ID NO: 380691 - DNA, 12 bp, Artificial Sequence
  Oligonucleotide primer for the detection of SNP TSC0063933
ctttttataaaa

SEQ ID NO: 380692 - DNA, 12 bp, Artificial Sequence
  Oligonucleotide primer for the detection of SNP TSC0063934
gagtttaggagg

SEQ ID NO: 380693 - DNA, 12 bp, Artificial Sequence
  Oligonucleotide primer for the detection of SNP TSC0063935
ccattaaacatc

SEQ ID NO: 380694 - DNA, 12 bp, Artificial Sequence
  Oligonucleotide primer for the detection of SNP TSC0063936
cctcattctctc

SEQ ID NO: 380695 - DNA, 12 bp, Artificial Sequence
  Oligonucleotide primer for the detection of SNP TSC0063936
atggtagtaggt

SEQ ID NO: 380696 - DNA, 12 bp, Artificial Sequence
  Oligonucleotide primer for the detection of SNP TSC0063937
tagttgattaga

SEQ ID NO: 380697 - DNA, 12 bp, Artificial Sequence
  Oligonucleotide primer for the detection of SNP TSC0063938
aactaaataaat

SEQ ID NO: 380698 - DNA, 12 bp, Artificial Sequence
  Oligonucleotide primer for the detection of SNP TSC0009313
actcctttatac

SEQ ID NO: 380699 - DNA, 12 bp, Artificial Sequence
  Oligonucleotide primer for the detection of SNP TSC0009313
tgtggattgttg

SEQ ID NO: 380700 - DNA, 12 bp, Artificial Sequence
  Oligonucleotide primer for the detection of SNP TSC0063940
cttcatatctat

SEQ ID NO: 380701 - DNA, 12 bp, Artificial Sequence
  Oligonucleotide primer for the detection of SNP TSC0063940
taataagaggag

SEQ ID NO: 380702 - DNA, 12 bp, Artificial Sequence
  Oligonucleotide primer for the detection of SNP TSC0063941
tctattaaatat

SEQ ID NO: 380703 - DNA, 12 bp, Artificial Sequence
  Oligonucleotide primer for the detection of SNP TSC0063941
ttgtttgtagat

SEQ ID NO: 380704 - DNA, 12 bp, Artificial Sequence
  Oligonucleotide primer for the detection of SNP TSC0063941
actatttataaa

SEQ ID NO: 380705 - DNA, 12 bp, Artificial Sequence
  Oligonucleotide primer for the detection of SNP TSC0063941
tttattaaatat

SEQ ID NO: 380706 - DNA, 12 bp, Artificial Sequence
  Oligonucleotide primer for the detection of SNP TSC0004750
ctttaaaaaata

SEQ ID NO: 380707 - DNA, 12 bp, Artificial Sequence
  Oligonucleotide primer for the detection of SNP TSC0004750
ttatgagataat

SEQ ID NO: 380708 - DNA, 12 bp, Artificial Sequence
  Oligonucleotide primer for the detection of SNP TSC0004750
ttacgagataat

SEQ ID NO: 380709 - DNA, 12 bp, Artificial Sequence
  Oligonucleotide primer for the detection of SNP TSC0004750
ctacaaaataac

SEQ ID NO: 380710 - DNA, 12 bp, Artificial Sequence
  Oligonucleotide primer for the detection of SNP TSC0004750
ctacgaaataac

SEQ ID NO: 380711 - DNA, 12 bp, Artificial Sequence
  Oligonucleotide primer for the detection of SNP TSC0004750
ttttgaaagatg

SEQ ID NO: 380712 - DNA, 12 bp, Artificial Sequence
  Oligonucleotide primer for the detection of SNP TSC0004751
gtgtgggatttg

SEQ ID NO: 380713 - DNA, 12 bp, Artificial Sequence
  Oligonucleotide primer for the detection of SNP TSC0004751
atataaaatcta

SEQ ID NO: 380714 - DNA, 12 bp, Artificial Sequence
  Oligonucleotide primer for the detection of SNP TSC0004751
ttaagtaggtat

SEQ ID NO: 380715 - DNA, 12 bp, Artificial Sequence
  Oligonucleotide primer for the detection of SNP TSC0063945
aatctttccatt

SEQ ID NO: 380716 - DNA, 12 bp, Artificial Sequence
  Oligonucleotide primer for the detection of SNP TSC0063945
agttagtaaagg

SEQ ID NO: 380717 - DNA, 12 bp, Artificial Sequence
  Oligonucleotide primer for the detection of SNP TSC0063946
aaaaatcattcc

SEQ ID NO: 380718 - DNA, 12 bp, Artificial Sequence
  Oligonucleotide primer for the detection of SNP TSC0063946
aataaaggtggt

SEQ ID NO: 380719 - DNA, 12 bp, Artificial Sequence
  Oligonucleotide primer for the detection of SNP TSC0063947
ataataatttat

SEQ ID NO: 380720 - DNA, 12 bp, Artificial Sequence
  Oligonucleotide primer for the detection of SNP TSC0063947
aacaataattta

SEQ ID NO: 380721 - DNA, 12 bp, Artificial Sequence
  Oligonucleotide primer for the detection of SNP TSC0063947
ttgaaagtatat

SEQ ID NO: 380722 - DNA, 12 bp, Artificial Sequence
  Oligonucleotide primer for the detection of SNP TSC0063949
tgtgatgaaata

SEQ ID NO: 380723 - DNA, 12 bp, Artificial Sequence
  Oligonucleotide primer for the detection of SNP TSC0063950
ttaatccattac

SEQ ID NO: 380724 - DNA, 12 bp, Artificial Sequence
  Oligonucleotide primer for the detection of SNP TSC0063950
gagttggtgttg

SEQ ID NO: 380725 - DNA, 12 bp, Artificial Sequence
  Oligonucleotide primer for the detection of SNP TSC0063953
tttatcttacac

SEQ ID NO: 380726 - DNA, 12 bp, Artificial Sequence
  Oligonucleotide primer for the detection of SNP TSC0063953
tcaccttatcat

SEQ ID NO: 380727 - DNA, 12 bp, Artificial Sequence
  Oligonucleotide primer for the detection of SNP TSC0063953
ttgttttgtatt

SEQ ID NO: 380728 - DNA, 12 bp, Artificial Sequence
  Oligonucleotide primer for the detection of SNP TSC0063954
ttagggttaggt

SEQ ID NO: 380729 - DNA, 12 bp, Artificial Sequence
  Oligonucleotide primer for the detection of SNP TSC0063954
ttagggttaggc

SEQ ID NO: 380730 - DNA, 12 bp, Artificial Sequence
  Oligonucleotide primer for the detection of SNP TSC0063954
caaaaccaaaca

SEQ ID NO: 380731 - DNA, 12 bp, Artificial Sequence
  Oligonucleotide primer for the detection of SNP TSC0063954
caaaaccaaacg

SEQ ID NO: 380732 - DNA, 12 bp, Artificial Sequence
  Oligonucleotide primer for the detection of SNP TSC0063954
gttgtaagtttt

SEQ ID NO: 380733 - DNA, 12 bp, Artificial Sequence
  Oligonucleotide primer for the detection of SNP TSC0004946
cataccctacaa

SEQ ID NO: 380734 - DNA, 12 bp, Artificial Sequence
  Oligonucleotide primer for the detection of SNP TSC0004946
aagagtaaagta

SEQ ID NO: 380735 - DNA, 12 bp, Artificial Sequence
  Oligonucleotide primer for the detection of SNP TSC0004946
tatgttttgtag

SEQ ID NO: 380736 - DNA, 12 bp, Artificial Sequence
  Oligonucleotide primer for the detection of SNP TSC0004728
ccttaataaacc

SEQ ID NO: 380737 - DNA, 12 bp, Artificial Sequence
  Oligonucleotide primer for the detection of SNP TSC0004728
aaaggatttgag

SEQ ID NO: 380738 - DNA, 12 bp, Artificial Sequence
  Oligonucleotide primer for the detection of SNP TSC0004729
gaagatttaaaa

SEQ ID NO: 380739 - DNA, 12 bp, Artificial Sequence
  Oligonucleotide primer for the detection of SNP TSC0063955
taatctaatctt

SEQ ID NO: 380740 - DNA, 12 bp, Artificial Sequence
  Oligonucleotide primer for the detection of SNP TSC0004681
gttttttaagaa

SEQ ID NO: 380741 - DNA, 12 bp, Artificial Sequence
  Oligonucleotide primer for the detection of SNP TSC0010867
aactcaatctct

SEQ ID NO: 380742 - DNA, 12 bp, Artificial Sequence
  Oligonucleotide primer for the detection of SNP TSC0063958
ctaattaatctc

SEQ ID NO: 380743 - DNA, 12 bp, Artificial Sequence
  Oligonucleotide primer for the detection of SNP TSC0063960
tcacatacccac

SEQ ID NO: 380744 - DNA, 12 bp, Artificial Sequence
  Oligonucleotide primer for the detection of SNP TSC0063960
atttgagaagag

SEQ ID NO: 380745 - DNA, 12 bp, Artificial Sequence
  Oligonucleotide primer for the detection of SNP TSC0063961
gataataatttt

SEQ ID NO: 380746 - DNA, 12 bp, Artificial Sequence
  Oligonucleotide primer for the detection of SNP TSC0063961
aacaacaacctt

SEQ ID NO: 380747 - DNA, 12 bp, Artificial Sequence
  Oligonucleotide primer for the detection of SNP TSC0005727
ctctcttattac

SEQ ID NO: 380748 - DNA, 12 bp, Artificial Sequence
  Oligonucleotide primer for the detection of SNP TSC0005728
aatcaaaatacc

SEQ ID NO: 380749 - DNA, 12 bp, Artificial Sequence
  Oligonucleotide primer for the detection of SNP TSC0005728
tgttgagttggg

SEQ ID NO: 380750 - DNA, 12 bp, Artificial Sequence
  Oligonucleotide primer for the detection of SNP TSC0010595
taaaaaccatct

SEQ ID NO: 380751 - DNA, 12 bp, Artificial Sequence
  Oligonucleotide primer for the detection of SNP TSC0010595
tttttagagatt

SEQ ID NO: 380752 - DNA, 12 bp, Artificial Sequence
  Oligonucleotide primer for the detection of SNP TSC0010595
tggaggttattt

SEQ ID NO: 380753 - DNA, 12 bp, Artificial Sequence
  Oligonucleotide primer for the detection of SNP TSC0010596
ataatattttac

SEQ ID NO: 380754 - DNA, 12 bp, Artificial Sequence
  Oligonucleotide primer for the detection of SNP TSC0010596
aggtagataggg

SEQ ID NO: 380755 - DNA, 12 bp, Artificial Sequence
  Oligonucleotide primer for the detection of SNP TSC0063969
tttttataatgt

SEQ ID NO: 380756 - DNA, 12 bp, Artificial Sequence
  Oligonucleotide primer for the detection of SNP TSC0063969
tttttataacgt

SEQ ID NO: 380757 - DNA, 12 bp, Artificial Sequence
  Oligonucleotide primer for the detection of SNP TSC0063969
tctttataacac

SEQ ID NO: 380758 - DNA, 12 bp, Artificial Sequence
  Oligonucleotide primer for the detection of SNP TSC0063969
tctttataacgc

SEQ ID NO: 380759 - DNA, 12 bp, Artificial Sequence
  Oligonucleotide primer for the detection of SNP TSC0063969
aatgaaattaag

SEQ ID NO: 380760 - DNA, 12 bp, Artificial Sequence
  Oligonucleotide primer for the detection of SNP TSC0009170
aagggttttgag

SEQ ID NO: 380761 - DNA, 12 bp, Artificial Sequence
  Oligonucleotide primer for the detection of SNP TSC0009171
aagttttgtagg

SEQ ID NO: 380762 - DNA, 12 bp, Artificial Sequence
  Oligonucleotide primer for the detection of SNP TSC0063974
cttatctttacc

SEQ ID NO: 380763 - DNA, 12 bp, Artificial Sequence
  Oligonucleotide primer for the detection of SNP TSC0063974
gaaaaagaaatt

SEQ ID NO: 380764 - DNA, 12 bp, Artificial Sequence
  Oligonucleotide primer for the detection of SNP TSC0005062
ttaaaacctaat

SEQ ID NO: 380765 - DNA, 12 bp, Artificial Sequence
  Oligonucleotide primer for the detection of SNP TSC0005062
ggtaggtttaga

SEQ ID NO: 380766 - DNA, 12 bp, Artificial Sequence
  Oligonucleotide primer for the detection of SNP TSC0005062
aacaaattcaaa

SEQ ID NO: 380767 - DNA, 12 bp, Artificial Sequence
  Oligonucleotide primer for the detection of SNP TSC0005062
ttaggatttgat

SEQ ID NO: 380768 - DNA, 12 bp, Artificial Sequence
  Oligonucleotide primer for the detection of SNP TSC0004757
aaaacgaaattt

SEQ ID NO: 380769 - DNA, 12 bp, Artificial Sequence
  Oligonucleotide primer for the detection of SNP TSC0004758
tcaaataattct

SEQ ID NO: 380770 - DNA, 12 bp, Artificial Sequence
  Oligonucleotide primer for the detection of SNP TSC0063976
actctttcaatt

SEQ ID NO: 380771 - DNA, 12 bp, Artificial Sequence
  Oligonucleotide primer for the detection of SNP TSC0063976
gattgttaattt

SEQ ID NO: 380772 - DNA, 12 bp, Artificial Sequence
  Oligonucleotide primer for the detection of SNP TSC0063976
ctattaacctaa

SEQ ID NO: 380773 - DNA, 12 bp, Artificial Sequence
  Oligonucleotide primer for the detection of SNP TSC0063977
ttcaatttccaa

SEQ ID NO: 380774 - DNA, 12 bp, Artificial Sequence
  Oligonucleotide primer for the detection of SNP TSC0063977
tttgagattgtt

SEQ ID NO: 380775 - DNA, 12 bp, Artificial Sequence
  Oligonucleotide primer for the detection of SNP TSC0005801
taaacaaccaac

SEQ ID NO: 380776 - DNA, 12 bp, Artificial Sequence
  Oligonucleotide primer for the detection of SNP TSC0005801
agtttatgtagg

SEQ ID NO: 380777 - DNA, 12 bp, Artificial Sequence
  Oligonucleotide primer for the detection of SNP TSC0063980
ttatccttacta

SEQ ID NO: 380778 - DNA, 12 bp, Artificial Sequence
  Oligonucleotide primer for the detection of SNP TSC0063980
gataagataatg

SEQ ID NO: 380779 - DNA, 12 bp, Artificial Sequence
  Oligonucleotide primer for the detection of SNP TSC0063981
taactttacctt

SEQ ID NO: 380780 - DNA, 12 bp, Artificial Sequence
  Oligonucleotide primer for the detection of SNP TSC0063982
aatcctaaactc

SEQ ID NO: 380781 - DNA, 12 bp, Artificial Sequence
  Oligonucleotide primer for the detection of SNP TSC0063982
tgtttgttagag

SEQ ID NO: 380782 - DNA, 12 bp, Artificial Sequence
  Oligonucleotide primer for the detection of SNP TSC0063983
acctaacacatt

SEQ ID NO: 380783 - DNA, 12 bp, Artificial Sequence
  Oligonucleotide primer for the detection of SNP TSC0063984
ttaaatctattt

SEQ ID NO: 380784 - DNA, 12 bp, Artificial Sequence
  Oligonucleotide primer for the detection of SNP TSC0063984
atggagttttta

SEQ ID NO: 380785 - DNA, 12 bp, Artificial Sequence
  Oligonucleotide primer for the detection of SNP TSC0009480
tatctctttaat

SEQ ID NO: 380786 - DNA, 12 bp, Artificial Sequence
  Oligonucleotide primer for the detection of SNP TSC0009480
taaggatgggta

SEQ ID NO: 380787 - DNA, 12 bp, Artificial Sequence
  Oligonucleotide primer for the detection of SNP TSC0000392
attttcacccaa

SEQ ID NO: 380788 - DNA, 12 bp, Artificial Sequence
  Oligonucleotide primer for the detection of SNP TSC0063985
aaatttctctac

SEQ ID NO: 380789 - DNA, 12 bp, Artificial Sequence
  Oligonucleotide primer for the detection of SNP TSC0063985
taatatttaatt

SEQ ID NO: 380790 - DNA, 12 bp, Artificial Sequence
  Oligonucleotide primer for the detection of SNP TSC0063985
gagtttttttat

SEQ ID NO: 380791 - DNA, 12 bp, Artificial Sequence
  Oligonucleotide primer for the detection of SNP TSC0000149
ccttaaaactat

SEQ ID NO: 380792 - DNA, 12 bp, Artificial Sequence
  Oligonucleotide primer for the detection of SNP TSC0000149
ggtagagattgg

SEQ ID NO: 380793 - DNA, 12 bp, Artificial Sequence
  Oligonucleotide primer for the detection of SNP TSC0063987
ttttaaaggtgt

SEQ ID NO: 380794 - DNA, 12 bp, Artificial Sequence
  Oligonucleotide primer for the detection of SNP TSC0000528
ggagaaaaggaa

SEQ ID NO: 380795 - DNA, 12 bp, Artificial Sequence
  Oligonucleotide primer for the detection of SNP TSC0007177
tatttctaaaaa

SEQ ID NO: 380796 - DNA, 12 bp, Artificial Sequence
  Oligonucleotide primer for the detection of SNP TSC0007177
attttaagtagt

SEQ ID NO: 380797 - DNA, 12 bp, Artificial Sequence
  Oligonucleotide primer for the detection of SNP TSC0007177
ttttaggagttt

SEQ ID NO: 380798 - DNA, 12 bp, Artificial Sequence
  Oligonucleotide primer for the detection of SNP TSC0005396
caaaaaaattat

SEQ ID NO: 380799 - DNA, 12 bp, Artificial Sequence
  Oligonucleotide primer for the detection of SNP TSC0005396
tttttgggtttg

SEQ ID NO: 380800 - DNA, 12 bp, Artificial Sequence
  Oligonucleotide primer for the detection of SNP TSC0005397
caaacctataat

SEQ ID NO: 380801 - DNA, 12 bp, Artificial Sequence
  Oligonucleotide primer for the detection of SNP TSC0005397
tttagattagtt

SEQ ID NO: 380802 - DNA, 12 bp, Artificial Sequence
  Oligonucleotide primer for the detection of SNP TSC0005397
cctaaactaacc

SEQ ID NO: 380803 - DNA, 12 bp, Artificial Sequence
  Oligonucleotide primer for the detection of SNP TSC0005398
gatatgttgttt

SEQ ID NO: 380804 - DNA, 12 bp, Artificial Sequence
  Oligonucleotide primer for the detection of SNP TSC0005398
atatattaccta

SEQ ID NO: 380805 - DNA, 12 bp, Artificial Sequence
  Oligonucleotide primer for the detection of SNP TSC0005398
tttgatatttgc

SEQ ID NO: 380806 - DNA, 12 bp, Artificial Sequence
  Oligonucleotide primer for the detection of SNP TSC0005399
taacttcattct

SEQ ID NO: 380807 - DNA, 12 bp, Artificial Sequence
  Oligonucleotide primer for the detection of SNP TSC0005399
gtgggtttttgg

SEQ ID NO: 380808 - DNA, 12 bp, Artificial Sequence
  Oligonucleotide primer for the detection of SNP TSC0005399
ataaattcctaa

SEQ ID NO: 380809 - DNA, 12 bp, Artificial Sequence
  Oligonucleotide primer for the detection of SNP TSC0000726
cccaaacaaatt

SEQ ID NO: 380810 - DNA, 12 bp, Artificial Sequence
  Oligonucleotide primer for the detection of SNP TSC0000726
cccgaacaaatt

SEQ ID NO: 380811 - DNA, 12 bp, Artificial Sequence
  Oligonucleotide primer for the detection of SNP TSC0000726
ttgatttggggg

SEQ ID NO: 380812 - DNA, 12 bp, Artificial Sequence
  Oligonucleotide primer for the detection of SNP TSC0000727
ttttaatgaatt

SEQ ID NO: 380813 - DNA, 12 bp, Artificial Sequence
  Oligonucleotide primer for the detection of SNP TSC0000727
ttttaatgaatc

SEQ ID NO: 380814 - DNA, 12 bp, Artificial Sequence
  Oligonucleotide primer for the detection of SNP TSC0000727
ccttaataaatc

SEQ ID NO: 380815 - DNA, 12 bp, Artificial Sequence
  Oligonucleotide primer for the detection of SNP TSC0000727
aggattgtttgt

SEQ ID NO: 380816 - DNA, 12 bp, Artificial Sequence
  Oligonucleotide primer for the detection of SNP TSC0063992
catatctaaatt

SEQ ID NO: 380817 - DNA, 12 bp, Artificial Sequence
  Oligonucleotide primer for the detection of SNP TSC0063993
tccccaccccac

SEQ ID NO: 380818 - DNA, 12 bp, Artificial Sequence
  Oligonucleotide primer for the detection of SNP TSC0063993
tccccgccccac

SEQ ID NO: 380819 - DNA, 12 bp, Artificial Sequence
  Oligonucleotide primer for the detection of SNP TSC0063993
ttgtaagttaga

SEQ ID NO: 380820 - DNA, 12 bp, Artificial Sequence
  Oligonucleotide primer for the detection of SNP TSC0063994
gtaatgtgggga

SEQ ID NO: 380821 - DNA, 12 bp, Artificial Sequence
  Oligonucleotide primer for the detection of SNP TSC0063994
gtaacgtgggga

SEQ ID NO: 380822 - DNA, 12 bp, Artificial Sequence
  Oligonucleotide primer for the detection of SNP TSC0063994
ataacgtaaaaa

SEQ ID NO: 380823 - DNA, 12 bp, Artificial Sequence
  Oligonucleotide primer for the detection of SNP TSC0063994
ggaattgtggtt

SEQ ID NO: 380824 - DNA, 12 bp, Artificial Sequence
  Oligonucleotide primer for the detection of SNP TSC0063995
cctacaaaactt

SEQ ID NO: 380825 - DNA, 12 bp, Artificial Sequence
  Oligonucleotide primer for the detection of SNP TSC0063995
gattattattaa

SEQ ID NO: 380826 - DNA, 12 bp, Artificial Sequence
  Oligonucleotide primer for the detection of SNP TSC0001487
aattcttatact

SEQ ID NO: 380827 - DNA, 12 bp, Artificial Sequence
  Oligonucleotide primer for the detection of SNP TSC0006349
ggtgtaagtata

SEQ ID NO: 380828 - DNA, 12 bp, Artificial Sequence
  Oligonucleotide primer for the detection of SNP TSC0063997
tctataatatta

SEQ ID NO: 380829 - DNA, 12 bp, Artificial Sequence
  Oligonucleotide primer for the detection of SNP TSC0063997
ttgaatgaagaa

SEQ ID NO: 380830 - DNA, 12 bp, Artificial Sequence
  Oligonucleotide primer for the detection of SNP TSC0063997
tttatagtatta

SEQ ID NO: 380831 - DNA, 12 bp, Artificial Sequence
  Oligonucleotide primer for the detection of SNP TSC0063998
aaaccaccctaa

SEQ ID NO: 380832 - DNA, 12 bp, Artificial Sequence
  Oligonucleotide primer for the detection of SNP TSC0063998
atggaatatatt

SEQ ID NO: 380833 - DNA, 12 bp, Artificial Sequence
  Oligonucleotide primer for the detection of SNP TSC0063998
taaaacacacta

SEQ ID NO: 380834 - DNA, 12 bp, Artificial Sequence
  Oligonucleotide primer for the detection of SNP TSC0064002
aacaacaatccc

SEQ ID NO: 380835 - DNA, 12 bp, Artificial Sequence
  Oligonucleotide primer for the detection of SNP TSC0064002
gaatgttagttg

SEQ ID NO: 380836 - DNA, 12 bp, Artificial Sequence
  Oligonucleotide primer for the detection of SNP TSC0000657
ttactaacacta

SEQ ID NO: 380837 - DNA, 12 bp, Artificial Sequence
  Oligonucleotide primer for the detection of SNP TSC0010539
tcaaaaccactt

SEQ ID NO: 380838 - DNA, 12 bp, Artificial Sequence
  Oligonucleotide primer for the detection of SNP TSC0008640
ttaaatcactcc

SEQ ID NO: 380839 - DNA, 12 bp, Artificial Sequence
  Oligonucleotide primer for the detection of SNP TSC0008640
ccccttttaaac

SEQ ID NO: 380840 - DNA, 12 bp, Artificial Sequence
  Oligonucleotide primer for the detection of SNP TSC0008640
ttaaattatttc

SEQ ID NO: 380841 - DNA, 12 bp, Artificial Sequence
  Oligonucleotide primer for the detection of SNP TSC0008927
atccatcaatac

SEQ ID NO: 380842 - DNA, 12 bp, Artificial Sequence
  Oligonucleotide primer for the detection of SNP TSC0008928
aatcgacactaa

SEQ ID NO: 380843 - DNA, 12 bp, Artificial Sequence
  Oligonucleotide primer for the detection of SNP TSC0008928
atgttttaattt

SEQ ID NO: 380844 - DNA, 12 bp, Artificial Sequence
  Oligonucleotide primer for the detection of SNP TSC0008928
atattttaactt

SEQ ID NO: 380845 - DNA, 12 bp, Artificial Sequence
  Oligonucleotide primer for the detection of SNP TSC0008928
aattggtattag

SEQ ID NO: 380846 - DNA, 12 bp, Artificial Sequence
  Oligonucleotide primer for the detection of SNP TSC0008928
aatcggtattag

SEQ ID NO: 380847 - DNA, 12 bp, Artificial Sequence
  Oligonucleotide primer for the detection of SNP TSC0008929
ttaaaacattat

SEQ ID NO: 380848 - DNA, 12 bp, Artificial Sequence
  Oligonucleotide primer for the detection of SNP TSC0008929
ggttatggagta

SEQ ID NO: 380849 - DNA, 12 bp, Artificial Sequence
  Oligonucleotide primer for the detection of SNP TSC0008929
taaaatattgtt

SEQ ID NO: 380850 - DNA, 12 bp, Artificial Sequence
  Oligonucleotide primer for the detection of SNP TSC0010961
gttattatattg

SEQ ID NO: 380851 - DNA, 12 bp, Artificial Sequence
  Oligonucleotide primer for the detection of SNP TSC0064008
aaatccaacccc

SEQ ID NO: 380852 - DNA, 12 bp, Artificial Sequence
  Oligonucleotide primer for the detection of SNP TSC0064009
acaaatttacac

SEQ ID NO: 380853 - DNA, 12 bp, Artificial Sequence
  Oligonucleotide primer for the detection of SNP TSC0064009
gggtagtattga

SEQ ID NO: 380854 - DNA, 12 bp, Artificial Sequence
  Oligonucleotide primer for the detection of SNP TSC0064010
cattcctaaacc

SEQ ID NO: 380855 - DNA, 12 bp, Artificial Sequence
  Oligonucleotide primer for the detection of SNP TSC0064010
taggtaatagtg

SEQ ID NO: 380856 - DNA, 12 bp, Artificial Sequence
  Oligonucleotide primer for the detection of SNP TSC0064011
accaattactaa

SEQ ID NO: 380857 - DNA, 12 bp, Artificial Sequence
  Oligonucleotide primer for the detection of SNP TSC0064011
accctactccct

SEQ ID NO: 380858 - DNA, 12 bp, Artificial Sequence
  Oligonucleotide primer for the detection of SNP TSC0064011
gaattaattgtt

SEQ ID NO: 380859 - DNA, 12 bp, Artificial Sequence
  Oligonucleotide primer for the detection of SNP TSC0000092
ttataaggtaag

SEQ ID NO: 380860 - DNA, 12 bp, Artificial Sequence
  Oligonucleotide primer for the detection of SNP TSC0009944
ttcgatatatta

SEQ ID NO: 380861 - DNA, 12 bp, Artificial Sequence
  Oligonucleotide primer for the detection of SNP TSC0009945
tttatagaatat

SEQ ID NO: 380862 - DNA, 12 bp, Artificial Sequence
  Oligonucleotide primer for the detection of SNP TSC0009945
tttatagaatac

SEQ ID NO: 380863 - DNA, 12 bp, Artificial Sequence
  Oligonucleotide primer for the detection of SNP TSC0009945
atctacaaaata

SEQ ID NO: 380864 - DNA, 12 bp, Artificial Sequence
  Oligonucleotide primer for the detection of SNP TSC0009945
tggttgatggat

SEQ ID NO: 380865 - DNA, 12 bp, Artificial Sequence
  Oligonucleotide primer for the detection of SNP TSC0000510
tagtttatattg

SEQ ID NO: 380866 - DNA, 12 bp, Artificial Sequence
  Oligonucleotide primer for the detection of SNP TSC0000593
atataccaaact

SEQ ID NO: 380867 - DNA, 12 bp, Artificial Sequence
  Oligonucleotide primer for the detection of SNP TSC0064017
ggtagagttata

SEQ ID NO: 380868 - DNA, 12 bp, Artificial Sequence
  Oligonucleotide primer for the detection of SNP TSC0064018
aatttgtattga

SEQ ID NO: 380869 - DNA, 12 bp, Artificial Sequence
  Oligonucleotide primer for the detection of SNP TSC0064018
aattcgtattga

SEQ ID NO: 380870 - DNA, 12 bp, Artificial Sequence
  Oligonucleotide primer for the detection of SNP TSC0064019
aatttactacct

SEQ ID NO: 380871 - DNA, 12 bp, Artificial Sequence
  Oligonucleotide primer for the detection of SNP TSC0064019
ttttcaaaaata

SEQ ID NO: 380872 - DNA, 12 bp, Artificial Sequence
  Oligonucleotide primer for the detection of SNP TSC0064019
gatttattattt

SEQ ID NO: 380873 - DNA, 12 bp, Artificial Sequence
  Oligonucleotide primer for the detection of SNP TSC0064023
atcttatatatc

SEQ ID NO: 380874 - DNA, 12 bp, Artificial Sequence
  Oligonucleotide primer for the detection of SNP TSC0064024
aaacgaataaac

SEQ ID NO: 380875 - DNA, 12 bp, Artificial Sequence
  Oligonucleotide primer for the detection of SNP TSC0064024
aactctctctta

SEQ ID NO: 380876 - DNA, 12 bp, Artificial Sequence
  Oligonucleotide primer for the detection of SNP TSC0064024
agatggatgggt

SEQ ID NO: 380877 - DNA, 12 bp, Artificial Sequence
  Oligonucleotide primer for the detection of SNP TSC0064024
agacggatgggt

SEQ ID NO: 380878 - DNA, 12 bp, Artificial Sequence
  Oligonucleotide primer for the detection of SNP TSC0064025
tatatctcctcc

SEQ ID NO: 380879 - DNA, 12 bp, Artificial Sequence
  Oligonucleotide primer for the detection of SNP TSC0064025
attatagtttta

SEQ ID NO: 380880 - DNA, 12 bp, Artificial Sequence
  Oligonucleotide primer for the detection of SNP TSC0064026
ttataatttgta

SEQ ID NO: 380881 - DNA, 12 bp, Artificial Sequence
  Oligonucleotide primer for the detection of SNP TSC0064028
aatacctctacc

SEQ ID NO: 380882 - DNA, 12 bp, Artificial Sequence
  Oligonucleotide primer for the detection of SNP TSC0064028
tggtgagggtta

SEQ ID NO: 380883 - DNA, 12 bp, Artificial Sequence
  Oligonucleotide primer for the detection of SNP TSC0064028
gatgtttttgtt

SEQ ID NO: 380884 - DNA, 12 bp, Artificial Sequence
  Oligonucleotide primer for the detection of SNP TSC0064029
ataaaactacat

SEQ ID NO: 380885 - DNA, 12 bp, Artificial Sequence
  Oligonucleotide primer for the detection of SNP TSC0064029
tagttaggtttg

SEQ ID NO: 380886 - DNA, 12 bp, Artificial Sequence
  Oligonucleotide primer for the detection of SNP TSC0064030
gtttaagagtat

SEQ ID NO: 380887 - DNA, 12 bp, Artificial Sequence
  Oligonucleotide primer for the detection of SNP TSC0064030
atccaaaaacat

SEQ ID NO: 380888 - DNA, 12 bp, Artificial Sequence
  Oligonucleotide primer for the detection of SNP TSC0064030
agatgttggtgt

SEQ ID NO: 380889 - DNA, 12 bp, Artificial Sequence
  Oligonucleotide primer for the detection of SNP TSC0064031
atcaccaactac

SEQ ID NO: 380890 - DNA, 12 bp, Artificial Sequence
  Oligonucleotide primer for the detection of SNP TSC0064032
gaatcataaaac

SEQ ID NO: 380891 - DNA, 12 bp, Artificial Sequence
  Oligonucleotide primer for the detection of SNP TSC0064032
gcgtttattata

SEQ ID NO: 380892 - DNA, 12 bp, Artificial Sequence
  Oligonucleotide primer for the detection of SNP TSC0064033
aaaacacccact

SEQ ID NO: 380893 - DNA, 12 bp, Artificial Sequence
  Oligonucleotide primer for the detection of SNP TSC0064033
aaaacacccgct

SEQ ID NO: 380894 - DNA, 12 bp, Artificial Sequence
  Oligonucleotide primer for the detection of SNP TSC0064033
tgtagggtttgt

SEQ ID NO: 380895 - DNA, 12 bp, Artificial Sequence
  Oligonucleotide primer for the detection of SNP TSC0064033
tgtagggttcgt

SEQ ID NO: 380896 - DNA, 12 bp, Artificial Sequence
  Oligonucleotide primer for the detection of SNP TSC0064034
ttcttttatttt

SEQ ID NO: 380897 - DNA, 12 bp, Artificial Sequence
  Oligonucleotide primer for the detection of SNP TSC0064035
agagtttgtttt

SEQ ID NO: 380898 - DNA, 12 bp, Artificial Sequence
  Oligonucleotide primer for the detection of SNP TSC0064036
gtagtgttatta

SEQ ID NO: 380899 - DNA, 12 bp, Artificial Sequence
  Oligonucleotide primer for the detection of SNP TSC0064036
gtagcgttatta

SEQ ID NO: 380900 - DNA, 12 bp, Artificial Sequence
  Oligonucleotide primer for the detection of SNP TSC0064036
acaacaccacca

SEQ ID NO: 380901 - DNA, 12 bp, Artificial Sequence
  Oligonucleotide primer for the detection of SNP TSC0064036
acaacgccacca

SEQ ID NO: 380902 - DNA, 12 bp, Artificial Sequence
  Oligonucleotide primer for the detection of SNP TSC0064036
aattagttggat

SEQ ID NO: 380903 - DNA, 12 bp, Artificial Sequence
  Oligonucleotide primer for the detection of SNP TSC0064037
tcaaacaccccc

SEQ ID NO: 380904 - DNA, 12 bp, Artificial Sequence
  Oligonucleotide primer for the detection of SNP TSC0064037
tcaaacgccccc

SEQ ID NO: 380905 - DNA, 12 bp, Artificial Sequence
  Oligonucleotide primer for the detection of SNP TSC0064037
tttgttgtttcg

SEQ ID NO: 380906 - DNA, 12 bp, Artificial Sequence
  Oligonucleotide primer for the detection of SNP TSC0064037
cctactacttca

SEQ ID NO: 380907 - DNA, 12 bp, Artificial Sequence
  Oligonucleotide primer for the detection of SNP TSC0064037
cctactacttcg

SEQ ID NO: 380908 - DNA, 12 bp, Artificial Sequence
  Oligonucleotide primer for the detection of SNP TSC0064040
  unsure (5): unknown base
ttttntgggttg

SEQ ID NO: 380909 - DNA, 12 bp, Artificial Sequence
  Oligonucleotide primer for the detection of SNP TSC0064040
  unsure (5): unknown base
ttttntgggtcg

SEQ ID NO: 380910 - DNA, 12 bp, Artificial Sequence
  Oligonucleotide primer for the detection of SNP TSC0064040
  unsure (5): unknown base
ttccntaaacca

SEQ ID NO: 380911 - DNA, 12 bp, Artificial Sequence
  Oligonucleotide primer for the detection of SNP TSC0064040
  unsure (5): unknown base
ttccntaaaccg

SEQ ID NO: 380912 - DNA, 12 bp, Artificial Sequence
  Oligonucleotide primer for the detection of SNP TSC0064041
aataaaaaatcg

SEQ ID NO: 380913 - DNA, 12 bp, Artificial Sequence
  Oligonucleotide primer for the detection of SNP TSC0064041
atagttttatta

SEQ ID NO: 380914 - DNA, 12 bp, Artificial Sequence
  Oligonucleotide primer for the detection of SNP TSC0064041
acaactctacca

SEQ ID NO: 380915 - DNA, 12 bp, Artificial Sequence
  Oligonucleotide primer for the detection of SNP TSC0064041
aaatgaaaagtc

SEQ ID NO: 380916 - DNA, 12 bp, Artificial Sequence
  Oligonucleotide primer for the detection of SNP TSC0064044
cttaactaatta

SEQ ID NO: 380917 - DNA, 12 bp, Artificial Sequence
  Oligonucleotide primer for the detection of SNP TSC0064044
gtatttgtagat

SEQ ID NO: 380918 - DNA, 12 bp, Artificial Sequence
  Oligonucleotide primer for the detection of SNP TSC0064044
aatatttacaaa

SEQ ID NO: 380919 - DNA, 12 bp, Artificial Sequence
  Oligonucleotide primer for the detection of SNP TSC0064044
ttttaattaatt

SEQ ID NO: 380920 - DNA, 12 bp, Artificial Sequence
  Oligonucleotide primer for the detection of SNP TSC0064045
tttacatatact

SEQ ID NO: 380921 - DNA, 12 bp, Artificial Sequence
  Oligonucleotide primer for the detection of SNP TSC0064045
gtagtttatgta

SEQ ID NO: 380922 - DNA, 12 bp, Artificial Sequence
  Oligonucleotide primer for the detection of SNP TSC0064049
ttgttgtatttt

SEQ ID NO: 380923 - DNA, 12 bp, Artificial Sequence
  Oligonucleotide primer for the detection of SNP TSC0064049
ctactacatttc

SEQ ID NO: 380924 - DNA, 12 bp, Artificial Sequence
  Oligonucleotide primer for the detection of SNP TSC0064049
agtatagtaaga

SEQ ID NO: 380925 - DNA, 12 bp, Artificial Sequence
  Oligonucleotide primer for the detection of SNP TSC0064050
caaaatacattc

SEQ ID NO: 380926 - DNA, 12 bp, Artificial Sequence
  Oligonucleotide primer for the detection of SNP TSC0064050
atgaggttaagg

SEQ ID NO: 380927 - DNA, 12 bp, Artificial Sequence
  Oligonucleotide primer for the detection of SNP TSC0064053
acatattaaaac

SEQ ID NO: 380928 - DNA, 12 bp, Artificial Sequence
  Oligonucleotide primer for the detection of SNP TSC0064055
tttttgagagag

SEQ ID NO: 380929 - DNA, 12 bp, Artificial Sequence
  Oligonucleotide primer for the detection of SNP TSC0064056
agtgttgggatt

SEQ ID NO: 380930 - DNA, 12 bp, Artificial Sequence
  Oligonucleotide primer for the detection of SNP TSC0064058
aaactatatcac

SEQ ID NO: 380931 - DNA, 12 bp, Artificial Sequence
  Oligonucleotide primer for the detection of SNP TSC0064058
aagttgaggatg

SEQ ID NO: 380932 - DNA, 12 bp, Artificial Sequence
  Oligonucleotide primer for the detection of SNP TSC0064058
aggttgtgttat

SEQ ID NO: 380933 - DNA, 12 bp, Artificial Sequence
  Oligonucleotide primer for the detection of SNP TSC0064059
ccaccttataca

SEQ ID NO: 380934 - DNA, 12 bp, Artificial Sequence
  Oligonucleotide primer for the detection of SNP TSC0064059
gattttgatgat

SEQ ID NO: 380935 - DNA, 12 bp, Artificial Sequence
  Oligonucleotide primer for the detection of SNP TSC0064059
aatcctaataac

SEQ ID NO: 380936 - DNA, 12 bp, Artificial Sequence
  Oligonucleotide primer for the detection of SNP TSC0064059
ttattttgtgta

SEQ ID NO: 380937 - DNA, 12 bp, Artificial Sequence
  Oligonucleotide primer for the detection of SNP TSC0064062
aaacaaattcac

SEQ ID NO: 380938 - DNA, 12 bp, Artificial Sequence
  Oligonucleotide primer for the detection of SNP TSC0064062
atgtataattta

SEQ ID NO: 380939 - DNA, 12 bp, Artificial Sequence
  Oligonucleotide primer for the detection of SNP TSC0064063
cttcctaacaac

SEQ ID NO: 380940 - DNA, 12 bp, Artificial Sequence
  Oligonucleotide primer for the detection of SNP TSC0064063
gatttgtatggg

SEQ ID NO: 380941 - DNA, 12 bp, Artificial Sequence
  Oligonucleotide primer for the detection of SNP TSC0064064
aaaaacccattt

SEQ ID NO: 380942 - DNA, 12 bp, Artificial Sequence
  Oligonucleotide primer for the detection of SNP TSC0064064
aaaaacccgttt

SEQ ID NO: 380943 - DNA, 12 bp, Artificial Sequence
  Oligonucleotide primer for the detection of SNP TSC0064065
ccactcctcccc

SEQ ID NO: 380944 - DNA, 12 bp, Artificial Sequence
  Oligonucleotide primer for the detection of SNP TSC0064065
agagttttaata

SEQ ID NO: 380945 - DNA, 12 bp, Artificial Sequence
  Oligonucleotide primer for the detection of SNP TSC0064066
atctattaatat

SEQ ID NO: 380946 - DNA, 12 bp, Artificial Sequence
  Oligonucleotide primer for the detection of SNP TSC0064067
ttcctattataa

SEQ ID NO: 380947 - DNA, 12 bp, Artificial Sequence
  Oligonucleotide primer for the detection of SNP TSC0064067
tccaacacaaac

SEQ ID NO: 380948 - DNA, 12 bp, Artificial Sequence
  Oligonucleotide primer for the detection of SNP TSC0064067
tttttgttatag

SEQ ID NO: 380949 - DNA, 12 bp, Artificial Sequence
  Oligonucleotide primer for the detection of SNP TSC0064068
tactattactcc

SEQ ID NO: 380950 - DNA, 12 bp, Artificial Sequence
  Oligonucleotide primer for the detection of SNP TSC0064069
aaataaactcac

SEQ ID NO: 380951 - DNA, 12 bp, Artificial Sequence
  Oligonucleotide primer for the detection of SNP TSC0064069
attttcctttta

SEQ ID NO: 380952 - DNA, 12 bp, Artificial Sequence
  Oligonucleotide primer for the detection of SNP TSC0064069
aaatagatttat

SEQ ID NO: 380953 - DNA, 12 bp, Artificial Sequence
  Oligonucleotide primer for the detection of SNP TSC0064070
ctaaaaattatc

SEQ ID NO: 380954 - DNA, 12 bp, Artificial Sequence
  Oligonucleotide primer for the detection of SNP TSC0064070
aaagggatatgg

SEQ ID NO: 380955 - DNA, 12 bp, Artificial Sequence
  Oligonucleotide primer for the detection of SNP TSC0064071
aacaacctacac

SEQ ID NO: 380956 - DNA, 12 bp, Artificial Sequence
  Oligonucleotide primer for the detection of SNP TSC0064071
tgaatagtgaat

SEQ ID NO: 380957 - DNA, 12 bp, Artificial Sequence
  Oligonucleotide primer for the detection of SNP TSC0064072
ctacatttatta

SEQ ID NO: 380958 - DNA, 12 bp, Artificial Sequence
  Oligonucleotide primer for the detection of SNP TSC0064072
gaaataaagtat

SEQ ID NO: 380959 - DNA, 12 bp, Artificial Sequence
  Oligonucleotide primer for the detection of SNP TSC0064072
ttatatttattg

SEQ ID NO: 380960 - DNA, 12 bp, Artificial Sequence
  Oligonucleotide primer for the detection of SNP TSC0064073
acaatttttcca

SEQ ID NO: 380961 - DNA, 12 bp, Artificial Sequence
  Oligonucleotide primer for the detection of SNP TSC0064074
agtatatgtaaa

SEQ ID NO: 380962 - DNA, 12 bp, Artificial Sequence
  Oligonucleotide primer for the detection of SNP TSC0064076
cttcaataatca

SEQ ID NO: 380963 - DNA, 12 bp, Artificial Sequence
  Oligonucleotide primer for the detection of SNP TSC0064076
agatgagttatt

SEQ ID NO: 380964 - DNA, 12 bp, Artificial Sequence
  Oligonucleotide primer for the detection of SNP TSC0064076
aaaataaatcac

SEQ ID NO: 380965 - DNA, 12 bp, Artificial Sequence
  Oligonucleotide primer for the detection of SNP TSC0064076
tttttaatggtt

SEQ ID NO: 380966 - DNA, 12 bp, Artificial Sequence
  Oligonucleotide primer for the detection of SNP TSC0064079
caactctaaccc

SEQ ID NO: 380967 - DNA, 12 bp, Artificial Sequence
  Oligonucleotide primer for the detection of SNP TSC0064079
cgactctaaccc

SEQ ID NO: 380968 - DNA, 12 bp, Artificial Sequence
  Oligonucleotide primer for the detection of SNP TSC0064079
agttttatagga

SEQ ID NO: 380969 - DNA, 12 bp, Artificial Sequence
  Oligonucleotide primer for the detection of SNP TSC0064080
aatctcaccact

SEQ ID NO: 380970 - DNA, 12 bp, Artificial Sequence
  Oligonucleotide primer for the detection of SNP TSC0064080
gttaggttagag

SEQ ID NO: 380971 - DNA, 12 bp, Artificial Sequence
  Oligonucleotide primer for the detection of SNP TSC0064082
catattatacaa

SEQ ID NO: 380972 - DNA, 12 bp, Artificial Sequence
  Oligonucleotide primer for the detection of SNP TSC0064082
ttgtatatattt

SEQ ID NO: 380973 - DNA, 12 bp, Artificial Sequence
  Oligonucleotide primer for the detection of SNP TSC0064082
atatacatttaa

SEQ ID NO: 380974 - DNA, 12 bp, Artificial Sequence
  Oligonucleotide primer for the detection of SNP TSC0064084
atccccaccaca

SEQ ID NO: 380975 - DNA, 12 bp, Artificial Sequence
  Oligonucleotide primer for the detection of SNP TSC0064086
acaatctccatc

SEQ ID NO: 380976 - DNA, 12 bp, Artificial Sequence
  Oligonucleotide primer for the detection of SNP TSC0064086
acgatctccatc

SEQ ID NO: 380977 - DNA, 12 bp, Artificial Sequence
  Oligonucleotide primer for the detection of SNP TSC0064086
gtggataagatt

SEQ ID NO: 380978 - DNA, 12 bp, Artificial Sequence
  Oligonucleotide primer for the detection of SNP TSC0064086
cggtttttattt

SEQ ID NO: 380979 - DNA, 12 bp, Artificial Sequence
  Oligonucleotide primer for the detection of SNP TSC0064087
ttttcataaaaa

SEQ ID NO: 380980 - DNA, 12 bp, Artificial Sequence
  Oligonucleotide primer for the detection of SNP TSC0064087
tttcacctcaaa

SEQ ID NO: 380981 - DNA, 12 bp, Artificial Sequence
  Oligonucleotide primer for the detection of SNP TSC0064087
ttatgaggattt

SEQ ID NO: 380982 - DNA, 12 bp, Artificial Sequence
  Oligonucleotide primer for the detection of SNP TSC0064088
tcataaaaattt

SEQ ID NO: 380983 - DNA, 12 bp, Artificial Sequence
  Oligonucleotide primer for the detection of SNP TSC0064088
atttcacctcaa

SEQ ID NO: 380984 - DNA, 12 bp, Artificial Sequence
  Oligonucleotide primer for the detection of SNP TSC0064089
gtttgaaagttt

SEQ ID NO: 380985 - DNA, 12 bp, Artificial Sequence
  Oligonucleotide primer for the detection of SNP TSC0064089
cctaaaaattta

SEQ ID NO: 380986 - DNA, 12 bp, Artificial Sequence
  Oligonucleotide primer for the detection of SNP TSC0064089
atgtgtgtttta

SEQ ID NO: 380987 - DNA, 12 bp, Artificial Sequence
  Oligonucleotide primer for the detection of SNP TSC0064091
aattaattaatt

SEQ ID NO: 380988 - DNA, 12 bp, Artificial Sequence
  Oligonucleotide primer for the detection of SNP TSC0064093
aataatttactt

SEQ ID NO: 380989 - DNA, 12 bp, Artificial Sequence
  Oligonucleotide primer for the detection of SNP TSC0064093
aatgatttgttt

SEQ ID NO: 380990 - DNA, 12 bp, Artificial Sequence
  Oligonucleotide primer for the detection of SNP TSC0064102
atcacactaaac

SEQ ID NO: 380991 - DNA, 12 bp, Artificial Sequence
  Oligonucleotide primer for the detection of SNP TSC0064102
gaaaatggaaga

SEQ ID NO: 380992 - DNA, 12 bp, Artificial Sequence
  Oligonucleotide primer for the detection of SNP TSC0064103
caataatcttaa

SEQ ID NO: 380993 - DNA, 12 bp, Artificial Sequence
  Oligonucleotide primer for the detection of SNP TSC0064103
ggcggaggttgt

SEQ ID NO: 380994 - DNA, 12 bp, Artificial Sequence
  Oligonucleotide primer for the detection of SNP TSC0064104
ccacttcactac

SEQ ID NO: 380995 - DNA, 12 bp, Artificial Sequence
  Oligonucleotide primer for the detection of SNP TSC0064104
ttttgtatttaa

SEQ ID NO: 380996 - DNA, 12 bp, Artificial Sequence
  Oligonucleotide primer for the detection of SNP TSC0007006
cattaattactt

SEQ ID NO: 380997 - DNA, 12 bp, Artificial Sequence
  Oligonucleotide primer for the detection of SNP TSC0007006
aagagatgatta

SEQ ID NO: 380998 - DNA, 12 bp, Artificial Sequence
  Oligonucleotide primer for the detection of SNP TSC0064107
acaatctaaaaa

SEQ ID NO: 380999 - DNA, 12 bp, Artificial Sequence
  Oligonucleotide primer for the detection of SNP TSC0064107
ggggatttaaat

SEQ ID NO: 381000 - DNA, 12 bp, Artificial Sequence
  Oligonucleotide primer for the detection of SNP TSC0064107
gtaatttgaaaa

SEQ ID NO: 381001 - DNA, 12 bp, Artificial Sequence
  Oligonucleotide primer for the detection of SNP TSC0064109
tttttcctcaac

SEQ ID NO: 381002 - DNA, 12 bp, Artificial Sequence
  Oligonucleotide primer for the detection of SNP TSC0064109
taattggttgta

SEQ ID NO: 381003 - DNA, 12 bp, Artificial Sequence
  Oligonucleotide primer for the detection of SNP TSC0064110
tatatttcctat

SEQ ID NO: 381004 - DNA, 12 bp, Artificial Sequence
  Oligonucleotide primer for the detection of SNP TSC0064110
ataagaatttgg

SEQ ID NO: 381005 - DNA, 12 bp, Artificial Sequence
  Oligonucleotide primer for the detection of SNP TSC0064111
cactatccaaca

SEQ ID NO: 381006 - DNA, 12 bp, Artificial Sequence
  Oligonucleotide primer for the detection of SNP TSC0064111
ttatggaaagat

SEQ ID NO: 381007 - DNA, 12 bp, Artificial Sequence
  Oligonucleotide primer for the detection of SNP TSC0064112
aactaccacccc

SEQ ID NO: 381008 - DNA, 12 bp, Artificial Sequence
  Oligonucleotide primer for the detection of SNP TSC0064112
aactaccgcccc

SEQ ID NO: 381009 - DNA, 12 bp, Artificial Sequence
  Oligonucleotide primer for the detection of SNP TSC0064112
gatgagttttgg

SEQ ID NO: 381010 - DNA, 12 bp, Artificial Sequence
  Oligonucleotide primer for the detection of SNP TSC0064112
gattgttgtttt

SEQ ID NO: 381011 - DNA, 12 bp, Artificial Sequence
  Oligonucleotide primer for the detection of SNP TSC0064112
gattgtcgtttt

SEQ ID NO: 381012 - DNA, 12 bp, Artificial Sequence
  Oligonucleotide primer for the detection of SNP TSC0064114
ccataaactatc

SEQ ID NO: 381013 - DNA, 12 bp, Artificial Sequence
  Oligonucleotide primer for the detection of SNP TSC0064114
tttagggaaggg

SEQ ID NO: 381014 - DNA, 12 bp, Artificial Sequence
  Oligonucleotide primer for the detection of SNP TSC0064115
cctaacttaacc

SEQ ID NO: 381015 - DNA, 12 bp, Artificial Sequence
  Oligonucleotide primer for the detection of SNP TSC0064115
ttttgttgggta

SEQ ID NO: 381016 - DNA, 12 bp, Artificial Sequence
  Oligonucleotide primer for the detection of SNP TSC0064119
tccctccttccc

SEQ ID NO: 381017 - DNA, 12 bp, Artificial Sequence
  Oligonucleotide primer for the detection of SNP TSC0064121
ccaaaataatac

SEQ ID NO: 381018 - DNA, 12 bp, Artificial Sequence
  Oligonucleotide primer for the detection of SNP TSC0064129
ccatcaatatta

SEQ ID NO: 381019 - DNA, 12 bp, Artificial Sequence
  Oligonucleotide primer for the detection of SNP TSC0064129
ctctatactacc

SEQ ID NO: 381020 - DNA, 12 bp, Artificial Sequence
  Oligonucleotide primer for the detection of SNP TSC0064129
ttattaatgttg

SEQ ID NO: 381021 - DNA, 12 bp, Artificial Sequence
  Oligonucleotide primer for the detection of SNP TSC0064130
ctaataactata

SEQ ID NO: 381022 - DNA, 12 bp, Artificial Sequence
  Oligonucleotide primer for the detection of SNP TSC0064130
tattagtaatgt

SEQ ID NO: 381023 - DNA, 12 bp, Artificial Sequence
  Oligonucleotide primer for the detection of SNP TSC0064130
taccaataatac

SEQ ID NO: 381024 - DNA, 12 bp, Artificial Sequence
  Oligonucleotide primer for the detection of SNP TSC0064130
gttgatagttgt

SEQ ID NO: 381025 - DNA, 12 bp, Artificial Sequence
  Oligonucleotide primer for the detection of SNP TSC0064131
tattttccctcc

SEQ ID NO: 381026 - DNA, 12 bp, Artificial Sequence
  Oligonucleotide primer for the detection of SNP TSC0064131
tacctaccacta

SEQ ID NO: 381027 - DNA, 12 bp, Artificial Sequence
  Oligonucleotide primer for the detection of SNP TSC0064132
caaacttatact

SEQ ID NO: 381028 - DNA, 12 bp, Artificial Sequence
  Oligonucleotide primer for the detection of SNP TSC0064133
aattctacactc

SEQ ID NO: 381029 - DNA, 12 bp, Artificial Sequence
  Oligonucleotide primer for the detection of SNP TSC0064133
agtagagaggtt

SEQ ID NO: 381030 - DNA, 12 bp, Artificial Sequence
  Oligonucleotide primer for the detection of SNP TSC0064134
tgttattgggga

SEQ ID NO: 381031 - DNA, 12 bp, Artificial Sequence
  Oligonucleotide primer for the detection of SNP TSC0064135
caacttcacttc

SEQ ID NO: 381032 - DNA, 12 bp, Artificial Sequence
  Oligonucleotide primer for the detection of SNP TSC0064135
ttttggatggaa

SEQ ID NO: 381033 - DNA, 12 bp, Artificial Sequence
  Oligonucleotide primer for the detection of SNP TSC0064136
ttgagatatttt

SEQ ID NO: 381034 - DNA, 12 bp, Artificial Sequence
  Oligonucleotide primer for the detection of SNP TSC0064136
aataaaggttaa

SEQ ID NO: 381035 - DNA, 12 bp, Artificial Sequence
  Oligonucleotide primer for the detection of SNP TSC0064139
atttttgattag

SEQ ID NO: 381036 - DNA, 12 bp, Artificial Sequence
  Oligonucleotide primer for the detection of SNP TSC0064139
attcctaatcaa

SEQ ID NO: 381037 - DNA, 12 bp, Artificial Sequence
  Oligonucleotide primer for the detection of SNP TSC0064139
aggtatagaggt

SEQ ID NO: 381038 - DNA, 12 bp, Artificial Sequence
  Oligonucleotide primer for the detection of SNP TSC0064140
aaaattcaaaat

SEQ ID NO: 381039 - DNA, 12 bp, Artificial Sequence
  Oligonucleotide primer for the detection of SNP TSC0064140
tgtaaattttga

SEQ ID NO: 381040 - DNA, 12 bp, Artificial Sequence
  Oligonucleotide primer for the detection of SNP TSC0064141
aaaattcccccc

SEQ ID NO: 381041 - DNA, 12 bp, Artificial Sequence
  Oligonucleotide primer for the detection of SNP TSC0064141
agtgatttttgg

SEQ ID NO: 381042 - DNA, 12 bp, Artificial Sequence
  Oligonucleotide primer for the detection of SNP TSC0064141
aataacctttaa

SEQ ID NO: 381043 - DNA, 12 bp, Artificial Sequence
  Oligonucleotide primer for the detection of SNP TSC0064141
gaggtttttttc

SEQ ID NO: 381044 - DNA, 12 bp, Artificial Sequence
  Oligonucleotide primer for the detection of SNP TSC0064142
ccatttccaaat

SEQ ID NO: 381045 - DNA, 12 bp, Artificial Sequence
  Oligonucleotide primer for the detection of SNP TSC0064143
caaatttatccc

SEQ ID NO: 381046 - DNA, 12 bp, Artificial Sequence
  Oligonucleotide primer for the detection of SNP TSC0064143
  unsure (4): unknown base
attnatttttta

SEQ ID NO: 381047 - DNA, 12 bp, Artificial Sequence
  Oligonucleotide primer for the detection of SNP TSC0064144
gatatttaaatt

SEQ ID NO: 381048 - DNA, 12 bp, Artificial Sequence
  Oligonucleotide primer for the detection of SNP TSC0064144
caaatatccaaa

SEQ ID NO: 381049 - DNA, 12 bp, Artificial Sequence
  Oligonucleotide primer for the detection of SNP TSC0064144
taggggttgata

SEQ ID NO: 381050 - DNA, 12 bp, Artificial Sequence
  Oligonucleotide primer for the detection of SNP TSC0064145
caaaaatctatt

SEQ ID NO: 381051 - DNA, 12 bp, Artificial Sequence
  Oligonucleotide primer for the detection of SNP TSC0064145
cgaaaatctatt

SEQ ID NO: 381052 - DNA, 12 bp, Artificial Sequence
  Oligonucleotide primer for the detection of SNP TSC0064145
tggttatattaa

SEQ ID NO: 381053 - DNA, 12 bp, Artificial Sequence
  Oligonucleotide primer for the detection of SNP TSC0064146
aatctaactaat

SEQ ID NO: 381054 - DNA, 12 bp, Artificial Sequence
  Oligonucleotide primer for the detection of SNP TSC0064146
ttatgtttatta

SEQ ID NO: 381055 - DNA, 12 bp, Artificial Sequence
  Oligonucleotide primer for the detection of SNP TSC0064146
ttacgtttatta

SEQ ID NO: 381056 - DNA, 12 bp, Artificial Sequence
  Oligonucleotide primer for the detection of SNP TSC0010398
aagaataagaaa

SEQ ID NO: 381057 - DNA, 12 bp, Artificial Sequence
  Oligonucleotide primer for the detection of SNP TSC0064148
aacttaaataaa

SEQ ID NO: 381058 - DNA, 12 bp, Artificial Sequence
  Oligonucleotide primer for the detection of SNP TSC0064148
ttcgttagtttt

SEQ ID NO: 381059 - DNA, 12 bp, Artificial Sequence
  Oligonucleotide primer for the detection of SNP TSC0064148
cccaccaactct

SEQ ID NO: 381060 - DNA, 12 bp, Artificial Sequence
  Oligonucleotide primer for the detection of SNP TSC0064148
cccgccaactct

SEQ ID NO: 381061 - DNA, 12 bp, Artificial Sequence
  Oligonucleotide primer for the detection of SNP TSC0064148
agtttgagtagg

SEQ ID NO: 381062 - DNA, 12 bp, Artificial Sequence
  Oligonucleotide primer for the detection of SNP TSC0064149
tcacacaaatat

SEQ ID NO: 381063 - DNA, 12 bp, Artificial Sequence
  Oligonucleotide primer for the detection of SNP TSC0064149
tcacgcaaatat

SEQ ID NO: 381064 - DNA, 12 bp, Artificial Sequence
  Oligonucleotide primer for the detection of SNP TSC0064150
tttttaaacaat

SEQ ID NO: 381065 - DNA, 12 bp, Artificial Sequence
  Oligonucleotide primer for the detection of SNP TSC0064151
cttataaaattt

SEQ ID NO: 381066 - DNA, 12 bp, Artificial Sequence
  Oligonucleotide primer for the detection of SNP TSC0064151
atgtttttgtta

SEQ ID NO: 381067 - DNA, 12 bp, Artificial Sequence
  Oligonucleotide primer for the detection of SNP TSC0064153
aataacatccat

SEQ ID NO: 381068 - DNA, 12 bp, Artificial Sequence
  Oligonucleotide primer for the detection of SNP TSC0064153
ttagttagtaaa

SEQ ID NO: 381069 - DNA, 12 bp, Artificial Sequence
  Oligonucleotide primer for the detection of SNP TSC0005134
ttatgatataga

SEQ ID NO: 381070 - DNA, 12 bp, Artificial Sequence
  Oligonucleotide primer for the detection of SNP TSC0064154
taggaaaattga

SEQ ID NO: 381071 - DNA, 12 bp, Artificial Sequence
  Oligonucleotide primer for the detection of SNP TSC0004774
ttactcatacta

SEQ ID NO: 381072 - DNA, 12 bp, Artificial Sequence
  Oligonucleotide primer for the detection of SNP TSC0004774
taaatatgaaat

SEQ ID NO: 381073 - DNA, 12 bp, Artificial Sequence
  Oligonucleotide primer for the detection of SNP TSC0064155
ggagattttaag

SEQ ID NO: 381074 - DNA, 12 bp, Artificial Sequence
  Oligonucleotide primer for the detection of SNP TSC0064156
aatttatttact

SEQ ID NO: 381075 - DNA, 12 bp, Artificial Sequence
  Oligonucleotide primer for the detection of SNP TSC0064156
actctctaaaca

SEQ ID NO: 381076 - DNA, 12 bp, Artificial Sequence
  Oligonucleotide primer for the detection of SNP TSC0064161
acattaaaaatt

SEQ ID NO: 381077 - DNA, 12 bp, Artificial Sequence
  Oligonucleotide primer for the detection of SNP TSC0064162
attcttattaac

SEQ ID NO: 381078 - DNA, 12 bp, Artificial Sequence
  Oligonucleotide primer for the detection of SNP TSC0064162
agttagagggtg

SEQ ID NO: 381079 - DNA, 12 bp, Artificial Sequence
  Oligonucleotide primer for the detection of SNP TSC0064163
caattatttata

SEQ ID NO: 381080 - DNA, 12 bp, Artificial Sequence
  Oligonucleotide primer for the detection of SNP TSC0064163
gtagattttagt

SEQ ID NO: 381081 - DNA, 12 bp, Artificial Sequence
  Oligonucleotide primer for the detection of SNP TSC0064163
acaaatttcaac

SEQ ID NO: 381082 - DNA, 12 bp, Artificial Sequence
  Oligonucleotide primer for the detection of SNP TSC0064164
actcctatcaat

SEQ ID NO: 381083 - DNA, 12 bp, Artificial Sequence
  Oligonucleotide primer for the detection of SNP TSC0064164
gttgaatataaa

SEQ ID NO: 381084 - DNA, 12 bp, Artificial Sequence
  Oligonucleotide primer for the detection of SNP TSC0010868
tgttgtatttat

SEQ ID NO: 381085 - DNA, 12 bp, Artificial Sequence
  Oligonucleotide primer for the detection of SNP TSC0010868
tactacacttac

SEQ ID NO: 381086 - DNA, 12 bp, Artificial Sequence
  Oligonucleotide primer for the detection of SNP TSC0010868
aaaattagtggg

SEQ ID NO: 381087 - DNA, 12 bp, Artificial Sequence
  Oligonucleotide primer for the detection of SNP TSC0010868
aaaattagcggg

SEQ ID NO: 381088 - DNA, 12 bp, Artificial Sequence
  Oligonucleotide primer for the detection of SNP TSC0064168
tatattagatat

SEQ ID NO: 381089 - DNA, 12 bp, Artificial Sequence
  Oligonucleotide primer for the detection of SNP TSC0064168
agtattaagaat

SEQ ID NO: 381090 - DNA, 12 bp, Artificial Sequence
  Oligonucleotide primer for the detection of SNP TSC0064169
tttaaacctatt

SEQ ID NO: 381091 - DNA, 12 bp, Artificial Sequence
  Oligonucleotide primer for the detection of SNP TSC0064169
gattagaaataa

SEQ ID NO: 381092 - DNA, 12 bp, Artificial Sequence
  Oligonucleotide primer for the detection of SNP TSC0009239
cctataatattc

SEQ ID NO: 381093 - DNA, 12 bp, Artificial Sequence
  Oligonucleotide primer for the detection of SNP TSC0009239
ttattgtgtgta

SEQ ID NO: 381094 - DNA, 12 bp, Artificial Sequence
  Oligonucleotide primer for the detection of SNP TSC0064170
ctatctaatatt

SEQ ID NO: 381095 - DNA, 12 bp, Artificial Sequence
  Oligonucleotide primer for the detection of SNP TSC0064170
gagggttgtaag

SEQ ID NO: 381096 - DNA, 12 bp, Artificial Sequence
  Oligonucleotide primer for the detection of SNP TSC0008012
cctttaactaaa

SEQ ID NO: 381097 - DNA, 12 bp, Artificial Sequence
  Oligonucleotide primer for the detection of SNP TSC0008013
atacataaattc

SEQ ID NO: 381098 - DNA, 12 bp, Artificial Sequence
  Oligonucleotide primer for the detection of SNP TSC0064172
tccctccctcaa

SEQ ID NO: 381099 - DNA, 12 bp, Artificial Sequence
  Oligonucleotide primer for the detection of SNP TSC0064172
tccctccctcga

SEQ ID NO: 381100 - DNA, 12 bp, Artificial Sequence
  Oligonucleotide primer for the detection of SNP TSC0064172
aattagtattat

SEQ ID NO: 381101 - DNA, 12 bp, Artificial Sequence
  Oligonucleotide primer for the detection of SNP TSC0064172
aattagtattac

SEQ ID NO: 381102 - DNA, 12 bp, Artificial Sequence
  Oligonucleotide primer for the detection of SNP TSC0006738
accacctcacct

SEQ ID NO: 381103 - DNA, 12 bp, Artificial Sequence
  Oligonucleotide primer for the detection of SNP TSC0064175
cattcactatta

SEQ ID NO: 381104 - DNA, 12 bp, Artificial Sequence
  Oligonucleotide primer for the detection of SNP TSC0064175
agtggttattat

SEQ ID NO: 381105 - DNA, 12 bp, Artificial Sequence
  Oligonucleotide primer for the detection of SNP TSC0064175
agtggttattac

SEQ ID NO: 381106 - DNA, 12 bp, Artificial Sequence
  Oligonucleotide primer for the detection of SNP TSC0064175
ataattactaca

SEQ ID NO: 381107 - DNA, 12 bp, Artificial Sequence
  Oligonucleotide primer for the detection of SNP TSC0064175
ataattactacg

SEQ ID NO: 381108 - DNA, 12 bp, Artificial Sequence
  Oligonucleotide primer for the detection of SNP TSC0064176
aaacatcaaaat

SEQ ID NO: 381109 - DNA, 12 bp, Artificial Sequence
  Oligonucleotide primer for the detection of SNP TSC0064176
tccatttataat

SEQ ID NO: 381110 - DNA, 12 bp, Artificial Sequence
  Oligonucleotide primer for the detection of SNP TSC0064176
aaatattagaat

SEQ ID NO: 381111 - DNA, 12 bp, Artificial Sequence
  Oligonucleotide primer for the detection of SNP TSC0064177
accttcttaatt

SEQ ID NO: 381112 - DNA, 12 bp, Artificial Sequence
  Oligonucleotide primer for the detection of SNP TSC0064177
tggaatggaata

SEQ ID NO: 381113 - DNA, 12 bp, Artificial Sequence
  Oligonucleotide primer for the detection of SNP TSC0064178
ctaataatattt

SEQ ID NO: 381114 - DNA, 12 bp, Artificial Sequence
  Oligonucleotide primer for the detection of SNP TSC0064179
gtaagtttttta

SEQ ID NO: 381115 - DNA, 12 bp, Artificial Sequence
  Oligonucleotide primer for the detection of SNP TSC0064180
ttcttttctccc

SEQ ID NO: 381116 - DNA, 12 bp, Artificial Sequence
  Oligonucleotide primer for the detection of SNP TSC0064180
gtgttaggtatt

SEQ ID NO: 381117 - DNA, 12 bp, Artificial Sequence
  Oligonucleotide primer for the detection of SNP TSC0064180
tataccaaatac

SEQ ID NO: 381118 - DNA, 12 bp, Artificial Sequence
  Oligonucleotide primer for the detection of SNP TSC0064184
taaaattaggaa

SEQ ID NO: 381119 - DNA, 12 bp, Artificial Sequence
  Oligonucleotide primer for the detection of SNP TSC0064184
gagaataaaggt

SEQ ID NO: 381120 - DNA, 12 bp, Artificial Sequence
  Oligonucleotide primer for the detection of SNP TSC0064185
tataacacaaac

SEQ ID NO: 381121 - DNA, 12 bp, Artificial Sequence
  Oligonucleotide primer for the detection of SNP TSC0064185
tatactctacta

SEQ ID NO: 381122 - DNA, 12 bp, Artificial Sequence
  Oligonucleotide primer for the detection of SNP TSC0006268
attctttcattt

SEQ ID NO: 381123 - DNA, 12 bp, Artificial Sequence
  Oligonucleotide primer for the detection of SNP TSC0006268
aagaataaataa

SEQ ID NO: 381124 - DNA, 12 bp, Artificial Sequence
  Oligonucleotide primer for the detection of SNP TSC0064186
atgtatggtgtg

SEQ ID NO: 381125 - DNA, 12 bp, Artificial Sequence
  Oligonucleotide primer for the detection of SNP TSC0064186
atgtgtatatat

SEQ ID NO: 381126 - DNA, 12 bp, Artificial Sequence
  Oligonucleotide primer for the detection of SNP TSC0064187
ttaatgtatttg

SEQ ID NO: 381127 - DNA, 12 bp, Artificial Sequence
  Oligonucleotide primer for the detection of SNP TSC0064190
ataattcaataa

SEQ ID NO: 381128 - DNA, 12 bp, Artificial Sequence
  Oligonucleotide primer for the detection of SNP TSC0064190
ttatttattttc

SEQ ID NO: 381129 - DNA, 12 bp, Artificial Sequence
  Oligonucleotide primer for the detection of SNP TSC0064190
ataatttagtag

SEQ ID NO: 381130 - DNA, 12 bp, Artificial Sequence
  Oligonucleotide primer for the detection of SNP TSC0004814
acaactattact

SEQ ID NO: 381131 - DNA, 12 bp, Artificial Sequence
  Oligonucleotide primer for the detection of SNP TSC0004814
tagagatataag

SEQ ID NO: 381132 - DNA, 12 bp, Artificial Sequence
  Oligonucleotide primer for the detection of SNP TSC0004815
atacctcaaaaa

SEQ ID NO: 381133 - DNA, 12 bp, Artificial Sequence
  Oligonucleotide primer for the detection of SNP TSC0004815
tcctctaacatc

SEQ ID NO: 381134 - DNA, 12 bp, Artificial Sequence
  Oligonucleotide primer for the detection of SNP TSC0004815
ggtgttttaggg

SEQ ID NO: 381135 - DNA, 12 bp, Artificial Sequence
  Oligonucleotide primer for the detection of SNP TSC0064191
tctacacatctc

SEQ ID NO: 381136 - DNA, 12 bp, Artificial Sequence
  Oligonucleotide primer for the detection of SNP TSC0064191
aggtaggagggg

SEQ ID NO: 381137 - DNA, 12 bp, Artificial Sequence
  Oligonucleotide primer for the detection of SNP TSC0064192
aaataaatctac

SEQ ID NO: 381138 - DNA, 12 bp, Artificial Sequence
  Oligonucleotide primer for the detection of SNP TSC0064192
ttataaagatta

SEQ ID NO: 381139 - DNA, 12 bp, Artificial Sequence
  Oligonucleotide primer for the detection of SNP TSC0064192
ccataaaaatta

SEQ ID NO: 381140 - DNA, 12 bp, Artificial Sequence
  Oligonucleotide primer for the detection of SNP TSC0064192
gagtgggtttat

SEQ ID NO: 381141 - DNA, 12 bp, Artificial Sequence
  Oligonucleotide primer for the detection of SNP TSC0004998
aaatgtagttat

SEQ ID NO: 381142 - DNA, 12 bp, Artificial Sequence
  Oligonucleotide primer for the detection of SNP TSC0004998
aaatataatcat

SEQ ID NO: 381143 - DNA, 12 bp, Artificial Sequence
  Oligonucleotide primer for the detection of SNP TSC0004998
agaaaagttgaa

SEQ ID NO: 381144 - DNA, 12 bp, Artificial Sequence
  Oligonucleotide primer for the detection of SNP TSC0064199
tcccctcctatc

SEQ ID NO: 381145 - DNA, 12 bp, Artificial Sequence
  Oligonucleotide primer for the detection of SNP TSC0064199
agtgtataggta

SEQ ID NO: 381146 - DNA, 12 bp, Artificial Sequence
  Oligonucleotide primer for the detection of SNP TSC0064199
aatacacaaaca

SEQ ID NO: 381147 - DNA, 12 bp, Artificial Sequence
  Oligonucleotide primer for the detection of SNP TSC0064200
atagtattttgt

SEQ ID NO: 381148 - DNA, 12 bp, Artificial Sequence
  Oligonucleotide primer for the detection of SNP TSC0064200
tacaatacctta

SEQ ID NO: 381149 - DNA, 12 bp, Artificial Sequence
  Oligonucleotide primer for the detection of SNP TSC0064202
acatctttcctt

SEQ ID NO: 381150 - DNA, 12 bp, Artificial Sequence
  Oligonucleotide primer for the detection of SNP TSC0064202
ttttaaggatga

SEQ ID NO: 381151 - DNA, 12 bp, Artificial Sequence
  Oligonucleotide primer for the detection of SNP TSC0064206
taacaatcacat

SEQ ID NO: 381152 - DNA, 12 bp, Artificial Sequence
  Oligonucleotide primer for the detection of SNP TSC0064206
tttgatgtttta

SEQ ID NO: 381153 - DNA, 12 bp, Artificial Sequence
  Oligonucleotide primer for the detection of SNP TSC0064207
tcaataaaattt

SEQ ID NO: 381154 - DNA, 12 bp, Artificial Sequence
  Oligonucleotide primer for the detection of SNP TSC0064207
tctcaatccaat

SEQ ID NO: 381155 - DNA, 12 bp, Artificial Sequence
  Oligonucleotide primer for the detection of SNP TSC0064207
ttaatagggttt

SEQ ID NO: 381156 - DNA, 12 bp, Artificial Sequence
  Oligonucleotide primer for the detection of SNP TSC0064208
aaattctacaac

SEQ ID NO: 381157 - DNA, 12 bp, Artificial Sequence
  Oligonucleotide primer for the detection of SNP TSC0064208
attattgtggag

SEQ ID NO: 381158 - DNA, 12 bp, Artificial Sequence
  Oligonucleotide primer for the detection of SNP TSC0064208
gattttatagtt

SEQ ID NO: 381159 - DNA, 12 bp, Artificial Sequence
  Oligonucleotide primer for the detection of SNP TSC0064209
tctctttatcat

SEQ ID NO: 381160 - DNA, 12 bp, Artificial Sequence
  Oligonucleotide primer for the detection of SNP TSC0064209
tgattatgatga

SEQ ID NO: 381161 - DNA, 12 bp, Artificial Sequence
  Oligonucleotide primer for the detection of SNP TSC0064209
cgattatgatga

SEQ ID NO: 381162 - DNA, 12 bp, Artificial Sequence
  Oligonucleotide primer for the detection of SNP TSC0008272
tatagtagggtt

SEQ ID NO: 381163 - DNA, 12 bp, Artificial Sequence
  Oligonucleotide primer for the detection of SNP TSC0008272
cacaataaaatt

SEQ ID NO: 381164 - DNA, 12 bp, Artificial Sequence
  Oligonucleotide primer for the detection of SNP TSC0008272
taggaatagaaa

SEQ ID NO: 381165 - DNA, 12 bp, Artificial Sequence
  Oligonucleotide primer for the detection of SNP TSC0007500
acaaactttctt

SEQ ID NO: 381166 - DNA, 12 bp, Artificial Sequence
  Oligonucleotide primer for the detection of SNP TSC0008450
taccaacaaacc

SEQ ID NO: 381167 - DNA, 12 bp, Artificial Sequence
  Oligonucleotide primer for the detection of SNP TSC0008450
ggttttgatgta

SEQ ID NO: 381168 - DNA, 12 bp, Artificial Sequence
  Oligonucleotide primer for the detection of SNP TSC0008451
tataatatattt

SEQ ID NO: 381169 - DNA, 12 bp, Artificial Sequence
  Oligonucleotide primer for the detection of SNP TSC0008451
ttattgtgtaaa

SEQ ID NO: 381170 - DNA, 12 bp, Artificial Sequence
  Oligonucleotide primer for the detection of SNP TSC0064210
tagaggaataaa

SEQ ID NO: 381171 - DNA, 12 bp, Artificial Sequence
  Oligonucleotide primer for the detection of SNP TSC0064210
cggggggtgggg

SEQ ID NO: 381172 - DNA, 12 bp, Artificial Sequence
  Oligonucleotide primer for the detection of SNP TSC0001454
attaatacttat

SEQ ID NO: 381173 - DNA, 12 bp, Artificial Sequence
  Oligonucleotide primer for the detection of SNP TSC0001455
gtttttaaagtt

SEQ ID NO: 381174 - DNA, 12 bp, Artificial Sequence
  Oligonucleotide primer for the detection of SNP TSC0001455
attttcaaaact

SEQ ID NO: 381175 - DNA, 12 bp, Artificial Sequence
  Oligonucleotide primer for the detection of SNP TSC0001455
aaaatttagtaa

SEQ ID NO: 381176 - DNA, 12 bp, Artificial Sequence
  Oligonucleotide primer for the detection of SNP TSC0000950
aaacacaaacca

SEQ ID NO: 381177 - DNA, 12 bp, Artificial Sequence
  Oligonucleotide primer for the detection of SNP TSC0000950
aaacacgaacca

SEQ ID NO: 381178 - DNA, 12 bp, Artificial Sequence
  Oligonucleotide primer for the detection of SNP TSC0000950
tgttggttgtgt

SEQ ID NO: 381179 - DNA, 12 bp, Artificial Sequence
  Oligonucleotide primer for the detection of SNP TSC0000950
tattaattatac

SEQ ID NO: 381180 - DNA, 12 bp, Artificial Sequence
  Oligonucleotide primer for the detection of SNP TSC0000950
aggtacgagtta

SEQ ID NO: 381181 - DNA, 12 bp, Artificial Sequence
  Oligonucleotide primer for the detection of SNP TSC0000183
atctaatcaatt

SEQ ID NO: 381182 - DNA, 12 bp, Artificial Sequence
  Oligonucleotide primer for the detection of SNP TSC0000183
tttggatttggg

SEQ ID NO: 381183 - DNA, 12 bp, Artificial Sequence
  Oligonucleotide primer for the detection of SNP TSC0005343
ccacccatactc

SEQ ID NO: 381184 - DNA, 12 bp, Artificial Sequence
  Oligonucleotide primer for the detection of SNP TSC0005343
tgtagtgatagg

SEQ ID NO: 381185 - DNA, 12 bp, Artificial Sequence
  Oligonucleotide primer for the detection of SNP TSC0005344
aaactttccaca

SEQ ID NO: 381186 - DNA, 12 bp, Artificial Sequence
  Oligonucleotide primer for the detection of SNP TSC0005344
aataaggagtgt

SEQ ID NO: 381187 - DNA, 12 bp, Artificial Sequence
  Oligonucleotide primer for the detection of SNP TSC0005344
aataaggagtgc

SEQ ID NO: 381188 - DNA, 12 bp, Artificial Sequence
  Oligonucleotide primer for the detection of SNP TSC0005049
tattttcttaca

SEQ ID NO: 381189 - DNA, 12 bp, Artificial Sequence
  Oligonucleotide primer for the detection of SNP TSC0005049
tgagattattta

SEQ ID NO: 381190 - DNA, 12 bp, Artificial Sequence
  Oligonucleotide primer for the detection of SNP TSC0064214
atatcataaaaa

SEQ ID NO: 381191 - DNA, 12 bp, Artificial Sequence
  Oligonucleotide primer for the detection of SNP TSC0064214
atatcgtaaaaa

SEQ ID NO: 381192 - DNA, 12 bp, Artificial Sequence
  Oligonucleotide primer for the detection of SNP TSC0064214
tgtggaaaaatt

SEQ ID NO: 381193 - DNA, 12 bp, Artificial Sequence
  Oligonucleotide primer for the detection of SNP TSC0064214
gatgttgtggaa

SEQ ID NO: 381194 - DNA, 12 bp, Artificial Sequence
  Oligonucleotide primer for the detection of SNP TSC0064214
gatgtcgtggaa

SEQ ID NO: 381195 - DNA, 12 bp, Artificial Sequence
  Oligonucleotide primer for the detection of SNP TSC0000820
ttctctacaaac

SEQ ID NO: 381196 - DNA, 12 bp, Artificial Sequence
  Oligonucleotide primer for the detection of SNP TSC0064215
tatatagtaaag

SEQ ID NO: 381197 - DNA, 12 bp, Artificial Sequence
  Oligonucleotide primer for the detection of SNP TSC0064216
agtgtaatagtt

SEQ ID NO: 381198 - DNA, 12 bp, Artificial Sequence
  Oligonucleotide primer for the detection of SNP TSC0064216
ataggtatgaag

SEQ ID NO: 381199 - DNA, 12 bp, Artificial Sequence
  Oligonucleotide primer for the detection of SNP TSC0064217
ttatcaacttac

SEQ ID NO: 381200 - DNA, 12 bp, Artificial Sequence
  Oligonucleotide primer for the detection of SNP TSC0064217
ttgataagaggt

SEQ ID NO: 381201 - DNA, 12 bp, Artificial Sequence
  Oligonucleotide primer for the detection of SNP TSC0064218
acgtatgtttta

SEQ ID NO: 381202 - DNA, 12 bp, Artificial Sequence
  Oligonucleotide primer for the detection of SNP TSC0064218
atgtacgtttta

SEQ ID NO: 381203 - DNA, 12 bp, Artificial Sequence
  Oligonucleotide primer for the detection of SNP TSC0064218
acgtacgtttta

SEQ ID NO: 381204 - DNA, 12 bp, Artificial Sequence
  Oligonucleotide primer for the detection of SNP TSC0064219
aacacaaaaact

SEQ ID NO: 381205 - DNA, 12 bp, Artificial Sequence
  Oligonucleotide primer for the detection of SNP TSC0010195
caaatcatatct

SEQ ID NO: 381206 - DNA, 12 bp, Artificial Sequence
  Oligonucleotide primer for the detection of SNP TSC0064220
tttgtattttaa

SEQ ID NO: 381207 - DNA, 12 bp, Artificial Sequence
  Oligonucleotide primer for the detection of SNP TSC0000911
ctaaatatatca

SEQ ID NO: 381208 - DNA, 12 bp, Artificial Sequence
  Oligonucleotide primer for the detection of SNP TSC0000911
agaggaaaagat

SEQ ID NO: 381209 - DNA, 12 bp, Artificial Sequence
  Oligonucleotide primer for the detection of SNP TSC0000911
ttggatatgtta

SEQ ID NO: 381210 - DNA, 12 bp, Artificial Sequence
  Oligonucleotide primer for the detection of SNP TSC0064223
ctctttatacat

SEQ ID NO: 381211 - DNA, 12 bp, Artificial Sequence
  Oligonucleotide primer for the detection of SNP TSC0064223
tttttgtgaagg

SEQ ID NO: 381212 - DNA, 12 bp, Artificial Sequence
  Oligonucleotide primer for the detection of SNP TSC0001111
ttccccaaatta

SEQ ID NO: 381213 - DNA, 12 bp, Artificial Sequence
  Oligonucleotide primer for the detection of SNP TSC0001111
gagaatggagtt

SEQ ID NO: 381214 - DNA, 12 bp, Artificial Sequence
  Oligonucleotide primer for the detection of SNP TSC0001112
caactcttcatc

SEQ ID NO: 381215 - DNA, 12 bp, Artificial Sequence
  Oligonucleotide primer for the detection of SNP TSC0001112
caactcttcgtc

SEQ ID NO: 381216 - DNA, 12 bp, Artificial Sequence
  Oligonucleotide primer for the detection of SNP TSC0001112
ttagagagtaag

SEQ ID NO: 381217 - DNA, 12 bp, Artificial Sequence
  Oligonucleotide primer for the detection of SNP TSC0001112
aatttttcgttt

SEQ ID NO: 381218 - DNA, 12 bp, Artificial Sequence
  Oligonucleotide primer for the detection of SNP TSC0064226
caaattaaaaac

SEQ ID NO: 381219 - DNA, 12 bp, Artificial Sequence
  Oligonucleotide primer for the detection of SNP TSC0064226
ggattagtgtta

SEQ ID NO: 381220 - DNA, 12 bp, Artificial Sequence
  Oligonucleotide primer for the detection of SNP TSC0064226
aaatcaatatca

SEQ ID NO: 381221 - DNA, 12 bp, Artificial Sequence
  Oligonucleotide primer for the detection of SNP TSC0064226
taaattagaagt

SEQ ID NO: 381222 - DNA, 12 bp, Artificial Sequence
  Oligonucleotide primer for the detection of SNP TSC0000889
cgaaaaaaataa

SEQ ID NO: 381223 - DNA, 12 bp, Artificial Sequence
  Oligonukleotid-Primer
tggagaagataa

SEQ ID NO: 381224 - DNA, 12 bp, Artificial Sequence
  Oligonucleotide primer for the detection of SNP TSC0000889
cggagaagataa

SEQ ID NO: 381225 - DNA, 12 bp, Artificial Sequence
  Oligonucleotide primer for the detection of SNP TSC0064227
taacttacaatc

SEQ ID NO: 381226 - DNA, 12 bp, Artificial Sequence
  Oligonucleotide primer for the detection of SNP TSC0064228
tatcatttattt

SEQ ID NO: 381227 - DNA, 12 bp, Artificial Sequence
  Oligonukleotid-Primer
atatttggagag

SEQ ID NO: 381228 - DNA, 12 bp, Artificial Sequence
  Oligonucleotide primer for the detection of SNP TSC0064229
aacaacaccaac

SEQ ID NO: 381229 - DNA, 12 bp, Artificial Sequence
  Oligonucleotide primer for the detection of SNP TSC0064230
ttaataaaactc

SEQ ID NO: 381230 - DNA, 12 bp, Artificial Sequence
  Oligonucleotide primer for the detection of SNP TSC0064230
atgttttattaa

SEQ ID NO: 381231 - DNA, 12 bp, Artificial Sequence
  Oligonucleotide primer for the detection of SNP TSC0064231
atttttaagaat

SEQ ID NO: 381232 - DNA, 12 bp, Artificial Sequence
  Oligonucleotide primer for the detection of SNP TSC0064231
catctctaaaaa

SEQ ID NO: 381233 - DNA, 12 bp, Artificial Sequence
  Oligonucleotide primer for the detection of SNP TSC0064232
ttattttggtag

SEQ ID NO: 381234 - DNA, 12 bp, Artificial Sequence
  Oligonucleotide primer for the detection of SNP TSC0064233
ccaaattctatt

SEQ ID NO: 381235 - DNA, 12 bp, Artificial Sequence
  Oligonucleotide primer for the detection of SNP TSC0064233
aagagaagaaaa

SEQ ID NO: 381236 - DNA, 12 bp, Artificial Sequence
  Oligonucleotide primer for the detection of SNP TSC0064235
tcaaactatcac

SEQ ID NO: 381237 - DNA, 12 bp, Artificial Sequence
  Oligonucleotide primer for the detection of SNP TSC0064235
gttagatttatg

SEQ ID NO: 381238 - DNA, 12 bp, Artificial Sequence
  Oligonucleotide primer for the detection of SNP TSC0001381
tatctctataac

SEQ ID NO: 381239 - DNA, 12 bp, Artificial Sequence
  Oligonucleotide primer for the detection of SNP TSC0001381
agaaaattttag

SEQ ID NO: 381240 - DNA, 12 bp, Artificial Sequence
  Oligonucleotide primer for the detection of SNP TSC0001381
aaaaaatcccaa

SEQ ID NO: 381241 - DNA, 12 bp, Artificial Sequence
  Oligonucleotide primer for the detection of SNP TSC0001381
tatttttgtgat

SEQ ID NO: 381242 - DNA, 12 bp, Artificial Sequence
  Oligonucleotide primer for the detection of SNP TSC0001381
tatttttgtgac

SEQ ID NO: 381243 - DNA, 12 bp, Artificial Sequence
  Oligonucleotide primer for the detection of SNP TSC0001024
ccaattctcctt

SEQ ID NO: 381244 - DNA, 12 bp, Artificial Sequence
  Oligonucleotide primer for the detection of SNP TSC0001024
gaggggttttta

SEQ ID NO: 381245 - DNA, 12 bp, Artificial Sequence
  Oligonucleotide primer for the detection of SNP TSC0010861
tgagtaaaggta

SEQ ID NO: 381246 - DNA, 12 bp, Artificial Sequence
  Oligonucleotide primer for the detection of SNP TSC0010861
agatagtaaagt

SEQ ID NO: 381247 - DNA, 12 bp, Artificial Sequence
  Oligonucleotide primer for the detection of SNP TSC0010862
atctattctatc

SEQ ID NO: 381248 - DNA, 12 bp, Artificial Sequence
  Oligonucleotide primer for the detection of SNP TSC0010862
aaagtataggaa

SEQ ID NO: 381249 - DNA, 12 bp, Artificial Sequence
  Oligonucleotide primer for the detection of SNP TSC0001518
cacatttaatac

SEQ ID NO: 381250 - DNA, 12 bp, Artificial Sequence
  Oligonucleotide primer for the detection of SNP TSC0001518
ccctacccccta

SEQ ID NO: 381251 - DNA, 12 bp, Artificial Sequence
  Oligonukleotid-Primer
tatatttagtgt

SEQ ID NO: 381252 - DNA, 12 bp, Artificial Sequence
  Oligonucleotide primer for the detection of SNP TSC0064236
ttatttatgtat

SEQ ID NO: 381253 - DNA, 12 bp, Artificial Sequence
  Oligonucleotide primer for the detection of SNP TSC0064237
aacacactacac

SEQ ID NO: 381254 - DNA, 12 bp, Artificial Sequence
  Oligonucleotide primer for the detection of SNP TSC0064237
aagaggttttgg

SEQ ID NO: 381255 - DNA, 12 bp, Artificial Sequence
  Oligonucleotide primer for the detection of SNP TSC0064238
aaccaacactat

SEQ ID NO: 381256 - DNA, 12 bp, Artificial Sequence
  Oligonucleotide primer for the detection of SNP TSC0064238
ttttagtgtatg

SEQ ID NO: 381257 - DNA, 12 bp, Artificial Sequence
  Oligonucleotide primer for the detection of SNP TSC0064238
ttttagcgtatg

SEQ ID NO: 381258 - DNA, 12 bp, Artificial Sequence
  Oligonucleotide primer for the detection of SNP TSC0064239
aaccaccaaaca

SEQ ID NO: 381259 - DNA, 12 bp, Artificial Sequence
  Oligonucleotide primer for the detection of SNP TSC0064239
agtttagtaagt

SEQ ID NO: 381260 - DNA, 12 bp, Artificial Sequence
  Oligonucleotide primer for the detection of SNP TSC0064239
aattcaacaaac

SEQ ID NO: 381261 - DNA, 12 bp, Artificial Sequence
  Oligonucleotide primer for the detection of SNP TSC0064239
tagttattagat

SEQ ID NO: 381262 - DNA, 12 bp, Artificial Sequence
  Oligonucleotide primer for the detection of SNP TSC0064241
ttctctaatcct

SEQ ID NO: 381263 - DNA, 12 bp, Artificial Sequence
  Oligonukleotid-Primer
tgaaataaggaa

SEQ ID NO: 381264 - DNA, 12 bp, Artificial Sequence
  Oligonucleotide primer for the detection of SNP TSC0064241
cgaaataaggaa

SEQ ID NO: 381265 - DNA, 12 bp, Artificial Sequence
  Oligonucleotide primer for the detection of SNP TSC0064242
tcaaaaacaaac

SEQ ID NO: 381266 - DNA, 12 bp, Artificial Sequence
  Oligonucleotide primer for the detection of SNP TSC0064243
ctttacaaatat

SEQ ID NO: 381267 - DNA, 12 bp, Artificial Sequence
  Oligonukleotid-Primer
taaggtttatat

SEQ ID NO: 381268 - DNA, 12 bp, Artificial Sequence
  Oligonucleotide primer for the detection of SNP TSC0064243
caaaacctacac

SEQ ID NO: 381269 - DNA, 12 bp, Artificial Sequence
  Oligonucleotide primer for the detection of SNP TSC0064243
ttttgtagatgt

SEQ ID NO: 381270 - DNA, 12 bp, Artificial Sequence
  Oligonucleotide primer for the detection of SNP TSC0005503
acaaattaatat

SEQ ID NO: 381271 - DNA, 12 bp, Artificial Sequence
  Oligonucleotide primer for the detection of SNP TSC0005503
acgaattaatat

SEQ ID NO: 381272 - DNA, 12 bp, Artificial Sequence
  Oligonucleotide primer for the detection of SNP TSC0006569
ctttaaaaacca

SEQ ID NO: 381273 - DNA, 12 bp, Artificial Sequence
  Oligonucleotide primer for the detection of SNP TSC0006569
ttatttcataaa

SEQ ID NO: 381274 - DNA, 12 bp, Artificial Sequence
  Oligonucleotide primer for the detection of SNP TSC0006569
ttatttcgtaaa

SEQ ID NO: 381275 - DNA, 12 bp, Artificial Sequence
  Oligonucleotide primer for the detection of SNP TSC0006569
gttttgagaatt

SEQ ID NO: 381276 - DNA, 12 bp, Artificial Sequence
  Oligonucleotide primer for the detection of SNP TSC0064247
tagtatatttat

SEQ ID NO: 381277 - DNA, 12 bp, Artificial Sequence
  Oligonucleotide primer for the detection of SNP TSC0064247
tatatccataaa

SEQ ID NO: 381278 - DNA, 12 bp, Artificial Sequence
  Oligonucleotide primer for the detection of SNP TSC0064247
gaggtgtaggta

SEQ ID NO: 381279 - DNA, 12 bp, Artificial Sequence
  Oligonucleotide primer for the detection of SNP TSC0000188
acttttcattct

SEQ ID NO: 381280 - DNA, 12 bp, Artificial Sequence
  Oligonucleotide primer for the detection of SNP TSC0000188
gagtagtataaa

SEQ ID NO: 381281 - DNA, 12 bp, Artificial Sequence
  Oligonucleotide primer for the detection of SNP TSC0001533
ccattatcccaa

SEQ ID NO: 381282 - DNA, 12 bp, Artificial Sequence
  Oligonucleotide primer for the detection of SNP TSC0001533
ataagaatttga

SEQ ID NO: 381283 - DNA, 12 bp, Artificial Sequence
  Oligonucleotide primer for the detection of SNP TSC0001533
caaaaatctaaa

SEQ ID NO: 381284 - DNA, 12 bp, Artificial Sequence
  Oligonucleotide primer for the detection of SNP TSC0001533
ttattattttaa

SEQ ID NO: 381285 - DNA, 12 bp, Artificial Sequence
  Oligonucleotide primer for the detection of SNP TSC0001534
atatttttacat

SEQ ID NO: 381286 - DNA, 12 bp, Artificial Sequence
  Oligonucleotide primer for the detection of SNP TSC0001534
atactcttacca

SEQ ID NO: 381287 - DNA, 12 bp, Artificial Sequence
  Oligonucleotide primer for the detection of SNP TSC0000223
ggaaagagatag

SEQ ID NO: 381288 - DNA, 12 bp, Artificial Sequence
  Oligonucleotide primer for the detection of SNP TSC0000223
gaattgatagta

SEQ ID NO: 381289 - DNA, 12 bp, Artificial Sequence
  Oligonucleotide primer for the detection of SNP TSC0009998
aactataccaat

SEQ ID NO: 381290 - DNA, 12 bp, Artificial Sequence
  Oligonucleotide primer for the detection of SNP TSC0009998
taagggagggag

SEQ ID NO: 381291 - DNA, 12 bp, Artificial Sequence
  Oligonucleotide primer for the detection of SNP TSC0001077
aacctcatttca

SEQ ID NO: 381292 - DNA, 12 bp, Artificial Sequence
  Oligonucleotide primer for the detection of SNP TSC0001077
aacttcttcatc

SEQ ID NO: 381293 - DNA, 12 bp, Artificial Sequence
  Oligonucleotide primer for the detection of SNP TSC0064252
taaaacaattca

SEQ ID NO: 381294 - DNA, 12 bp, Artificial Sequence
  Oligonucleotide primer for the detection of SNP TSC0064253
tttagagaaaga

SEQ ID NO: 381295 - DNA, 12 bp, Artificial Sequence
  Oligonucleotide primer for the detection of SNP TSC0064254
caaaaactccta

SEQ ID NO: 381296 - DNA, 12 bp, Artificial Sequence
  Oligonucleotide primer for the detection of SNP TSC0064254
ttatggggagtt

SEQ ID NO: 381297 - DNA, 12 bp, Artificial Sequence
  Oligonucleotide primer for the detection of SNP TSC0064254
ccataaaaaatc

SEQ ID NO: 381298 - DNA, 12 bp, Artificial Sequence
  Oligonucleotide primer for the detection of SNP TSC0064255
gggataataatg

SEQ ID NO: 381299 - DNA, 12 bp, Artificial Sequence
  Oligonucleotide primer for the detection of SNP TSC0064256
gggattaaataa

SEQ ID NO: 381300 - DNA, 12 bp, Artificial Sequence
  Oligonucleotide primer for the detection of SNP TSC0064256
gggagatttggt

SEQ ID NO: 381301 - DNA, 12 bp, Artificial Sequence
  Oligonucleotide primer for the detection of SNP TSC0064256
gggagatttggc

SEQ ID NO: 381302 - DNA, 12 bp, Artificial Sequence
  Oligonucleotide primer for the detection of SNP TSC0064258
tacattatctat

SEQ ID NO: 381303 - DNA, 12 bp, Artificial Sequence
  Oligonucleotide primer for the detection of SNP TSC0064258
tggtttttttga

SEQ ID NO: 381304 - DNA, 12 bp, Artificial Sequence
  Oligonucleotide primer for the detection of SNP TSC0064259
taatcccttttt

SEQ ID NO: 381305 - DNA, 12 bp, Artificial Sequence
  Oligonucleotide primer for the detection of SNP TSC0064259
tagggaagtttg

SEQ ID NO: 381306 - DNA, 12 bp, Artificial Sequence
  Oligonucleotide primer for the detection of SNP TSC0064260
attctcacaacc

SEQ ID NO: 381307 - DNA, 12 bp, Artificial Sequence
  Oligonucleotide primer for the detection of SNP TSC0064260
attttatcccta

SEQ ID NO: 381308 - DNA, 12 bp, Artificial Sequence
  Oligonucleotide primer for the detection of SNP TSC0064263
tagattaaggta

SEQ ID NO: 381309 - DNA, 12 bp, Artificial Sequence
  Oligonucleotide primer for the detection of SNP TSC0064263
agaaatttgaat

SEQ ID NO: 381310 - DNA, 12 bp, Artificial Sequence
  Oligonucleotide primer for the detection of SNP TSC0064267
aagtagatgttg

SEQ ID NO: 381311 - DNA, 12 bp, Artificial Sequence
  Oligonucleotide primer for the detection of SNP TSC0064269
ataacccaaaat

SEQ ID NO: 381312 - DNA, 12 bp, Artificial Sequence
  Oligonucleotide primer for the detection of SNP TSC0064269
gtatttagtttg

SEQ ID NO: 381313 - DNA, 12 bp, Artificial Sequence
  Oligonucleotide primer for the detection of SNP TSC0064272
gggaagattttg

SEQ ID NO: 381314 - DNA, 12 bp, Artificial Sequence
  Oligonucleotide primer for the detection of SNP TSC0064274
taaaaaccatat

SEQ ID NO: 381315 - DNA, 12 bp, Artificial Sequence
  Oligonucleotide primer for the detection of SNP TSC0064274
atttgtagatgt

SEQ ID NO: 381316 - DNA, 12 bp, Artificial Sequence
  Oligonucleotide primer for the detection of SNP TSC0064274
atttacaaatat

SEQ ID NO: 381317 - DNA, 12 bp, Artificial Sequence
  Oligonucleotide primer for the detection of SNP TSC0064274
tgggggttatgt

SEQ ID NO: 381318 - DNA, 12 bp, Artificial Sequence
  Oligonucleotide primer for the detection of SNP TSC0064275
aatattatttac

SEQ ID NO: 381319 - DNA, 12 bp, Artificial Sequence
  Oligonucleotide primer for the detection of SNP TSC0064275
ttatagttaata

SEQ ID NO: 381320 - DNA, 12 bp, Artificial Sequence
  Oligonucleotide primer for the detection of SNP TSC0064276
acctaaacttct

SEQ ID NO: 381321 - DNA, 12 bp, Artificial Sequence
  Oligonucleotide primer for the detection of SNP TSC0064276
gagtttgtgata

SEQ ID NO: 381322 - DNA, 12 bp, Artificial Sequence
  Oligonucleotide primer for the detection of SNP TSC0064278
actcattaactt

SEQ ID NO: 381323 - DNA, 12 bp, Artificial Sequence
  Oligonucleotide primer for the detection of SNP TSC0064278
agtgtattgtta

SEQ ID NO: 381324 - DNA, 12 bp, Artificial Sequence
  Oligonucleotide primer for the detection of SNP TSC0064280
atataatacatc

SEQ ID NO: 381325 - DNA, 12 bp, Artificial Sequence
  Oligonucleotide primer for the detection of SNP TSC0064280
ccatcctaatca

SEQ ID NO: 381326 - DNA, 12 bp, Artificial Sequence
  Oligonucleotide primer for the detection of SNP TSC0064280
atgtggtatatt

SEQ ID NO: 381327 - DNA, 12 bp, Artificial Sequence
  Oligonucleotide primer for the detection of SNP TSC0064281
aaaacattctcc

SEQ ID NO: 381328 - DNA, 12 bp, Artificial Sequence
  Oligonucleotide primer for the detection of SNP TSC0064281
gaatatgggtga

SEQ ID NO: 381329 - DNA, 12 bp, Artificial Sequence
  Oligonucleotide primer for the detection of SNP TSC0064286
aataccattcct

SEQ ID NO: 381330 - DNA, 12 bp, Artificial Sequence
  Oligonucleotide primer for the detection of SNP TSC0064286
gggttttatgaa

SEQ ID NO: 381331 - DNA, 12 bp, Artificial Sequence
  Oligonukleotid-Primer
acaaaataaata

SEQ ID NO: 381332 - DNA, 12 bp, Artificial Sequence
  Oligonucleotide primer for the detection of SNP TSC0064292
atctcactttat

SEQ ID NO: 381333 - DNA, 12 bp, Artificial Sequence
  Oligonucleotide primer for the detection of SNP TSC0064292
aatagagtgaat

SEQ ID NO: 381334 - DNA, 12 bp, Artificial Sequence
  Oligonucleotide primer for the detection of SNP TSC0064293
tttttaaaggtg

SEQ ID NO: 381335 - DNA, 12 bp, Artificial Sequence
  Oligonucleotide primer for the detection of SNP TSC0064293
tttttaaaggcg

SEQ ID NO: 381336 - DNA, 12 bp, Artificial Sequence
  Oligonucleotide primer for the detection of SNP TSC0064294
acctcaaatacc

SEQ ID NO: 381337 - DNA, 12 bp, Artificial Sequence
  Oligonucleotide primer for the detection of SNP TSC0064294
ttttagggtttg

SEQ ID NO: 381338 - DNA, 12 bp, Artificial Sequence
  Oligonucleotide primer for the detection of SNP TSC0064295
gttattgaaatt

SEQ ID NO: 381339 - DNA, 12 bp, Artificial Sequence
  Oligonukleotid-Primer
gaaaatttattt

SEQ ID NO: 381340 - DNA, 12 bp, Artificial Sequence
  Oligonucleotide primer for the detection of SNP TSC0064296
tttttaggaagt

SEQ ID NO: 381341 - DNA, 12 bp, Artificial Sequence
  Oligonucleotide primer for the detection of SNP TSC0064297
ttgagtaaagat

SEQ ID NO: 381342 - DNA, 12 bp, Artificial Sequence
  Oligonucleotide primer for the detection of SNP TSC0064297
tttaggatagag

SEQ ID NO: 381343 - DNA, 12 bp, Artificial Sequence
  Oligonukleotid-Primer
tcattaccttta

SEQ ID NO: 381344 - DNA, 12 bp, Artificial Sequence
  Oligonucleotide primer for the detection of SNP TSC0064298
tgttattgtttt

SEQ ID NO: 381345 - DNA, 12 bp, Artificial Sequence
  Oligonucleotide primer for the detection of SNP TSC0064298
tattactatccc

SEQ ID NO: 381346 - DNA, 12 bp, Artificial Sequence
  Oligonucleotide primer for the detection of SNP TSC0064299
cttacccaaatt

SEQ ID NO: 381347 - DNA, 12 bp, Artificial Sequence
  Oligonucleotide primer for the detection of SNP TSC0064299
taaaaaattgtg

SEQ ID NO: 381348 - DNA, 12 bp, Artificial Sequence
  Oligonucleotide primer for the detection of SNP TSC0064300
tttttgagattg

SEQ ID NO: 381349 - DNA, 12 bp, Artificial Sequence
  Oligonucleotide primer for the detection of SNP TSC0064300
tttttgagatcg

SEQ ID NO: 381350 - DNA, 12 bp, Artificial Sequence
  Oligonucleotide primer for the detection of SNP TSC0064300
ttttaaaaccaa

SEQ ID NO: 381351 - DNA, 12 bp, Artificial Sequence
  Oligonucleotide primer for the detection of SNP TSC0064300
ttttaaaaccga

SEQ ID NO: 381352 - DNA, 12 bp, Artificial Sequence
  Oligonucleotide primer for the detection of SNP TSC0064300
aatagagagaga

SEQ ID NO: 381353 - DNA, 12 bp, Artificial Sequence
  Oligonucleotide primer for the detection of SNP TSC0064302
aattcttataac

SEQ ID NO: 381354 - DNA, 12 bp, Artificial Sequence
  Oligonucleotide primer for the detection of SNP TSC0064302
tggaaatatttt

SEQ ID NO: 381355 - DNA, 12 bp, Artificial Sequence
  Oligonucleotide primer for the detection of SNP TSC0064303
aatctaacttaa

SEQ ID NO: 381356 - DNA, 12 bp, Artificial Sequence
  Oligonucleotide primer for the detection of SNP TSC0064305
taacttttttct

SEQ ID NO: 381357 - DNA, 12 bp, Artificial Sequence
  Oligonucleotide primer for the detection of SNP TSC0064306
cctttccttcac

SEQ ID NO: 381358 - DNA, 12 bp, Artificial Sequence
  Oligonucleotide primer for the detection of SNP TSC0064307
cactaatttcca

SEQ ID NO: 381359 - DNA, 12 bp, Artificial Sequence
  Oligonucleotide primer for the detection of SNP TSC0064308
taacaacactat

SEQ ID NO: 381360 - DNA, 12 bp, Artificial Sequence
  Oligonucleotide primer for the detection of SNP TSC0064308
gttttagttagt

SEQ ID NO: 381361 - DNA, 12 bp, Artificial Sequence
  Oligonucleotide primer for the detection of SNP TSC0064308
atttcaaccaac

SEQ ID NO: 381362 - DNA, 12 bp, Artificial Sequence
  Oligonucleotide primer for the detection of SNP TSC0064308
tggtagtattgt

SEQ ID NO: 381363 - DNA, 12 bp, Artificial Sequence
  Oligonukleotid-Primer
ttttattaataa

SEQ ID NO: 381364 - DNA, 12 bp, Artificial Sequence
  Oligonucleotide primer for the detection of SNP TSC0064309
ccttcactaatt

SEQ ID NO: 381365 - DNA, 12 bp, Artificial Sequence
  Oligonucleotide primer for the detection of SNP TSC0064309
tgttttattaat

SEQ ID NO: 381366 - DNA, 12 bp, Artificial Sequence
  Oligonucleotide primer for the detection of SNP TSC0064310
gaattttaagat

SEQ ID NO: 381367 - DNA, 12 bp, Artificial Sequence
  Oligonucleotide primer for the detection of SNP TSC0064310
aaacttcaaaac

SEQ ID NO: 381368 - DNA, 12 bp, Artificial Sequence
  Oligonucleotide primer for the detection of SNP TSC0064310
atatttatggta

SEQ ID NO: 381369 - DNA, 12 bp, Artificial Sequence
  Oligonucleotide primer for the detection of SNP TSC0064311
tacacccaaatt

SEQ ID NO: 381370 - DNA, 12 bp, Artificial Sequence
  Oligonucleotide primer for the detection of SNP TSC0064311
tagatgagtata

SEQ ID NO: 381371 - DNA, 12 bp, Artificial Sequence
  Oligonucleotide primer for the detection of SNP TSC0064312
taacctacaaac

SEQ ID NO: 381372 - DNA, 12 bp, Artificial Sequence
  Oligonucleotide primer for the detection of SNP TSC0064312
taacctacgaac

SEQ ID NO: 381373 - DNA, 12 bp, Artificial Sequence
  Oligonucleotide primer for the detection of SNP TSC0064313
actaactaacaa

SEQ ID NO: 381374 - DNA, 12 bp, Artificial Sequence
  Oligonucleotide primer for the detection of SNP TSC0064313
tagagtggatat

SEQ ID NO: 381375 - DNA, 12 bp, Artificial Sequence
  Oligonucleotide primer for the detection of SNP TSC0064313
caaaataaatat

SEQ ID NO: 381376 - DNA, 12 bp, Artificial Sequence
  Oligonucleotide primer for the detection of SNP TSC0064313
gttggttaataa

SEQ ID NO: 381377 - DNA, 12 bp, Artificial Sequence
  Oligonucleotide primer for the detection of SNP TSC0064314
acttttttcttc

SEQ ID NO: 381378 - DNA, 12 bp, Artificial Sequence
  Oligonucleotide primer for the detection of SNP TSC0064314
tatttttttgga

SEQ ID NO: 381379 - DNA, 12 bp, Artificial Sequence
  Oligonucleotide primer for the detection of SNP TSC0064321
ttgatattatta

SEQ ID NO: 381380 - DNA, 12 bp, Artificial Sequence
  Oligonucleotide primer for the detection of SNP TSC0064321
ttaatattatca

SEQ ID NO: 381381 - DNA, 12 bp, Artificial Sequence
  Oligonucleotide primer for the detection of SNP TSC0064321
agaaaaaaaagt

SEQ ID NO: 381382 - DNA, 12 bp, Artificial Sequence
  Oligonucleotide primer for the detection of SNP TSC0064322
catatttttctt

SEQ ID NO: 381383 - DNA, 12 bp, Artificial Sequence
  Oligonucleotide primer for the detection of SNP TSC0064322
gttaaataatat

SEQ ID NO: 381384 - DNA, 12 bp, Artificial Sequence
  Oligonucleotide primer for the detection of SNP TSC0064323
tccaacatctaa

SEQ ID NO: 381385 - DNA, 12 bp, Artificial Sequence
  Oligonucleotide primer for the detection of SNP TSC0064323
tttatttatttc

SEQ ID NO: 381386 - DNA, 12 bp, Artificial Sequence
  Oligonucleotide primer for the detection of SNP TSC0064323
tgtttagtattt

SEQ ID NO: 381387 - DNA, 12 bp, Artificial Sequence
  Oligonucleotide primer for the detection of SNP TSC0064324
tttggtattgtg

SEQ ID NO: 381388 - DNA, 12 bp, Artificial Sequence
  Oligonucleotide primer for the detection of SNP TSC0064324
tttggtatcgtg

SEQ ID NO: 381389 - DNA, 12 bp, Artificial Sequence
  Oligonucleotide primer for the detection of SNP TSC0064329
acaatttcccct

SEQ ID NO: 381390 - DNA, 12 bp, Artificial Sequence
  Oligonucleotide primer for the detection of SNP TSC0064329
agatggtaataa

SEQ ID NO: 381391 - DNA, 12 bp, Artificial Sequence
  Oligonucleotide primer for the detection of SNP TSC0064330
taaaatacgaat

SEQ ID NO: 381392 - DNA, 12 bp, Artificial Sequence
  Oligonucleotide primer for the detection of SNP TSC0064330
actttcactcca

SEQ ID NO: 381393 - DNA, 12 bp, Artificial Sequence
  Oligonucleotide primer for the detection of SNP TSC0064330
tgaggtatggat

SEQ ID NO: 381394 - DNA, 12 bp, Artificial Sequence
  Oligonucleotide primer for the detection of SNP TSC0064330
tgaggtacggat

SEQ ID NO: 381395 - DNA, 12 bp, Artificial Sequence
  Oligonucleotide primer for the detection of SNP TSC0064331
ttacaaatattc

SEQ ID NO: 381396 - DNA, 12 bp, Artificial Sequence
  Oligonucleotide primer for the detection of SNP TSC0064331
gtgatagaagta

SEQ ID NO: 381397 - DNA, 12 bp, Artificial Sequence
  Oligonucleotide primer for the detection of SNP TSC0064332
gaaattttagaa

SEQ ID NO: 381398 - DNA, 12 bp, Artificial Sequence
  Oligonucleotide primer for the detection of SNP TSC0064338
acaatattaatt

SEQ ID NO: 381399 - DNA, 12 bp, Artificial Sequence
  Oligonucleotide primer for the detection of SNP TSC0064338
tattttgtttag

SEQ ID NO: 381400 - DNA, 12 bp, Artificial Sequence
  Oligonucleotide primer for the detection of SNP TSC0064339
ataataataaac

SEQ ID NO: 381401 - DNA, 12 bp, Artificial Sequence
  Oligonucleotide primer for the detection of SNP TSC0064342
accatattaacc

SEQ ID NO: 381402 - DNA, 12 bp, Artificial Sequence
  Oligonucleotide primer for the detection of SNP TSC0064342
agtttgtgatta

SEQ ID NO: 381403 - DNA, 12 bp, Artificial Sequence
  Oligonucleotide primer for the detection of SNP TSC0064347
cttataacttac

SEQ ID NO: 381404 - DNA, 12 bp, Artificial Sequence
  Oligonucleotide primer for the detection of SNP TSC0064347
agttattaagga

SEQ ID NO: 381405 - DNA, 12 bp, Artificial Sequence
  Oligonucleotide primer for the detection of SNP TSC0064348
agaaatgataaa

SEQ ID NO: 381406 - DNA, 12 bp, Artificial Sequence
  Oligonucleotide primer for the detection of SNP TSC0064349
cttaccctttcc

SEQ ID NO: 381407 - DNA, 12 bp, Artificial Sequence
  Oligonucleotide primer for the detection of SNP TSC0064349
agaaatttttta

SEQ ID NO: 381408 - DNA, 12 bp, Artificial Sequence
  Oligonucleotide primer for the detection of SNP TSC0064350
tttcccttaccc

SEQ ID NO: 381409 - DNA, 12 bp, Artificial Sequence
  Oligonucleotide primer for the detection of SNP TSC0064350
acctttcatata

SEQ ID NO: 381410 - DNA, 12 bp, Artificial Sequence
  Oligonucleotide primer for the detection of SNP TSC0064351
gttattagttta

SEQ ID NO: 381411 - DNA, 12 bp, Artificial Sequence
  Oligonucleotide primer for the detection of SNP TSC0064352
tcaataaatttt

SEQ ID NO: 381412 - DNA, 12 bp, Artificial Sequence
  Oligonucleotide primer for the detection of SNP TSC0064352
aattgttttagg

SEQ ID NO: 381413 - DNA, 12 bp, Artificial Sequence
  Oligonucleotide primer for the detection of SNP TSC0064353
ttactattactt

SEQ ID NO: 381414 - DNA, 12 bp, Artificial Sequence
  Oligonucleotide primer for the detection of SNP TSC0064353
aaacacactaaa

SEQ ID NO: 381415 - DNA, 12 bp, Artificial Sequence
  Oligonucleotide primer for the detection of SNP TSC0064354
caaatcaaaata

SEQ ID NO: 381416 - DNA, 12 bp, Artificial Sequence
  Oligonucleotide primer for the detection of SNP TSC0064354
agagttaaaaag

SEQ ID NO: 381417 - DNA, 12 bp, Artificial Sequence
  Oligonucleotide primer for the detection of SNP TSC0006483
cctactaactcc

SEQ ID NO: 381418 - DNA, 12 bp, Artificial Sequence
  Oligonucleotide primer for the detection of SNP TSC0006483
gaggtgtgtttt

SEQ ID NO: 381419 - DNA, 12 bp, Artificial Sequence
  Oligonucleotide primer for the detection of SNP TSC0006483
gaggcgtgtttt

SEQ ID NO: 381420 - DNA, 12 bp, Artificial Sequence
  Oligonucleotide primer for the detection of SNP TSC0006483
gaggtgtgtttc

SEQ ID NO: 381421 - DNA, 12 bp, Artificial Sequence
  Oligonucleotide primer for the detection of SNP TSC0006483
gaggcgtgtttc

SEQ ID NO: 381422 - DNA, 12 bp, Artificial Sequence
  Oligonucleotide primer for the detection of SNP TSC0006483
aaaacgtacctc

SEQ ID NO: 381423 - DNA, 12 bp, Artificial Sequence
  Oligonucleotide primer for the detection of SNP TSC0006483
tttgttggtttc

SEQ ID NO: 381424 - DNA, 12 bp, Artificial Sequence
  Oligonucleotide primer for the detection of SNP TSC0064355
gaaaaagtattt

SEQ ID NO: 381425 - DNA, 12 bp, Artificial Sequence
  Oligonucleotide primer for the detection of SNP TSC0064355
taaagaaaaagt

SEQ ID NO: 381426 - DNA, 12 bp, Artificial Sequence
  Oligonucleotide primer for the detection of SNP TSC0064356
ctctaaaaccta

SEQ ID NO: 381427 - DNA, 12 bp, Artificial Sequence
  Oligonucleotide primer for the detection of SNP TSC0064356
gaataaaatttt

SEQ ID NO: 381428 - DNA, 12 bp, Artificial Sequence
  Oligonucleotide primer for the detection of SNP TSC0064356
aaataaaatctc

SEQ ID NO: 381429 - DNA, 12 bp, Artificial Sequence
  Oligonucleotide primer for the detection of SNP TSC0064358
aaaaaccaaact

SEQ ID NO: 381430 - DNA, 12 bp, Artificial Sequence
  Oligonucleotide primer for the detection of SNP TSC0064359
caaaatccctca

SEQ ID NO: 381431 - DNA, 12 bp, Artificial Sequence
  Oligonucleotide primer for the detection of SNP TSC0064359
ttggttatttat

SEQ ID NO: 381432 - DNA, 12 bp, Artificial Sequence
  Oligonucleotide primer for the detection of SNP TSC0064359
ttaaccacctat

SEQ ID NO: 381433 - DNA, 12 bp, Artificial Sequence
  Oligonucleotide primer for the detection of SNP TSC0064360
cccatcacctat

SEQ ID NO: 381434 - DNA, 12 bp, Artificial Sequence
  Oligonucleotide primer for the detection of SNP TSC0064360
ttgagttttatg

SEQ ID NO: 381435 - DNA, 12 bp, Artificial Sequence
  Oligonucleotide primer for the detection of SNP TSC0064360
ctaaatcccata

SEQ ID NO: 381436 - DNA, 12 bp, Artificial Sequence
  Oligonucleotide primer for the detection of SNP TSC0064364
acctcctacaac

SEQ ID NO: 381437 - DNA, 12 bp, Artificial Sequence
  Oligonucleotide primer for the detection of SNP TSC0064364
gttagagttgta

SEQ ID NO: 381438 - DNA, 12 bp, Artificial Sequence
  Oligonucleotide primer for the detection of SNP TSC0064364
gttagagtcgta

SEQ ID NO: 381439 - DNA, 12 bp, Artificial Sequence
  Oligonucleotide primer for the detection of SNP TSC0064364
accaaaaccgca

SEQ ID NO: 381440 - DNA, 12 bp, Artificial Sequence
  Oligonucleotide primer for the detection of SNP TSC0064364
gttttttgtagt

SEQ ID NO: 381441 - DNA, 12 bp, Artificial Sequence
  Oligonucleotide primer for the detection of SNP TSC0064365
tacaacaacata

SEQ ID NO: 381442 - DNA, 12 bp, Artificial Sequence
  Oligonucleotide primer for the detection of SNP TSC0064365
tacaacaacgta

SEQ ID NO: 381443 - DNA, 12 bp, Artificial Sequence
  Oligonucleotide primer for the detection of SNP TSC0064365
gggagttagagt

SEQ ID NO: 381444 - DNA, 12 bp, Artificial Sequence
  Oligonucleotide primer for the detection of SNP TSC0064365
tgtagtagtgtg

SEQ ID NO: 381445 - DNA, 12 bp, Artificial Sequence
  Oligonucleotide primer for the detection of SNP TSC0064365
tgtagtagcgtg

SEQ ID NO: 381446 - DNA, 12 bp, Artificial Sequence
  Oligonucleotide primer for the detection of SNP TSC0064368
attacctttatc

SEQ ID NO: 381447 - DNA, 12 bp, Artificial Sequence
  Oligonucleotide primer for the detection of SNP TSC0064368
gatataattgta

SEQ ID NO: 381448 - DNA, 12 bp, Artificial Sequence
  Oligonucleotide primer for the detection of SNP TSC0064369
atattgattttt

SEQ ID NO: 381449 - DNA, 12 bp, Artificial Sequence
  Oligonucleotide primer for the detection of SNP TSC0064369
aatgtaaaaatt

SEQ ID NO: 381450 - DNA, 12 bp, Artificial Sequence
  Oligonucleotide primer for the detection of SNP TSC0064370
aatttatacatc

SEQ ID NO: 381451 - DNA, 12 bp, Artificial Sequence
  Oligonucleotide primer for the detection of SNP TSC0064371
acatatctatat

SEQ ID NO: 381452 - DNA, 12 bp, Artificial Sequence
  Oligonucleotide primer for the detection of SNP TSC0064371
aggggtaatggg

SEQ ID NO: 381453 - DNA, 12 bp, Artificial Sequence
  Oligonucleotide primer for the detection of SNP TSC0064372
aaaaccacctca

SEQ ID NO: 381454 - DNA, 12 bp, Artificial Sequence
  Oligonucleotide primer for the detection of SNP TSC0064372
gagatgatattt

SEQ ID NO: 381455 - DNA, 12 bp, Artificial Sequence
  Oligonucleotide primer for the detection of SNP TSC0064373
ttttattcccct

SEQ ID NO: 381456 - DNA, 12 bp, Artificial Sequence
  Oligonucleotide primer for the detection of SNP TSC0064373
gggtggggatga

SEQ ID NO: 381457 - DNA, 12 bp, Artificial Sequence
  Oligonucleotide primer for the detection of SNP TSC0064373
gggcggggatga

SEQ ID NO: 381458 - DNA, 12 bp, Artificial Sequence
  Oligonucleotide primer for the detection of SNP TSC0064375
gaatttgtaaaa

SEQ ID NO: 381459 - DNA, 12 bp, Artificial Sequence
  Oligonucleotide primer for the detection of SNP TSC0064375
aaatttataaaa

SEQ ID NO: 381460 - DNA, 12 bp, Artificial Sequence
  Oligonucleotide primer for the detection of SNP TSC0064375
tatttttagagt

SEQ ID NO: 381461 - DNA, 12 bp, Artificial Sequence
  Oligonucleotide primer for the detection of SNP TSC0064376
atacttataaaa

SEQ ID NO: 381462 - DNA, 12 bp, Artificial Sequence
  Oligonucleotide primer for the detection of SNP TSC0064376
tttgaaaagtag

SEQ ID NO: 381463 - DNA, 12 bp, Artificial Sequence
  Oligonucleotide primer for the detection of SNP TSC0064377
tatctaccaatt

SEQ ID NO: 381464 - DNA, 12 bp, Artificial Sequence
  Oligonucleotide primer for the detection of SNP TSC0064378
ggtgtaattata

SEQ ID NO: 381465 - DNA, 12 bp, Artificial Sequence
  Oligonucleotide primer for the detection of SNP TSC0064378
aatacaatcata

SEQ ID NO: 381466 - DNA, 12 bp, Artificial Sequence
  Oligonucleotide primer for the detection of SNP TSC0064378
aggttggaatga

SEQ ID NO: 381467 - DNA, 12 bp, Artificial Sequence
  Oligonucleotide primer for the detection of SNP TSC0064380
accaaaaatctt

SEQ ID NO: 381468 - DNA, 12 bp, Artificial Sequence
  Oligonucleotide primer for the detection of SNP TSC0064380
accgaaaatctt

SEQ ID NO: 381469 - DNA, 12 bp, Artificial Sequence
  Oligonucleotide primer for the detection of SNP TSC0064380
tttttttgagtg

SEQ ID NO: 381470 - DNA, 12 bp, Artificial Sequence
  Oligonucleotide primer for the detection of SNP TSC0064381
ctaacaaaattc

SEQ ID NO: 381471 - DNA, 12 bp, Artificial Sequence
  Oligonucleotide primer for the detection of SNP TSC0064381
ctaacgaaattc

SEQ ID NO: 381472 - DNA, 12 bp, Artificial Sequence
  Oligonucleotide primer for the detection of SNP TSC0064381
agattgataaat

SEQ ID NO: 381473 - DNA, 12 bp, Artificial Sequence
  Oligonucleotide primer for the detection of SNP TSC0064381
ttaatggagttt

SEQ ID NO: 381474 - DNA, 12 bp, Artificial Sequence
  Oligonucleotide primer for the detection of SNP TSC0064381
ttaacggagttt

SEQ ID NO: 381475 - DNA, 12 bp, Artificial Sequence
  Oligonucleotide primer for the detection of SNP TSC0064382
cccactcctact

SEQ ID NO: 381476 - DNA, 12 bp, Artificial Sequence
  Oligonucleotide primer for the detection of SNP TSC0064383
ctaatacttttt

SEQ ID NO: 381477 - DNA, 12 bp, Artificial Sequence
  Oligonucleotide primer for the detection of SNP TSC0064383
gtgttaattata

SEQ ID NO: 381478 - DNA, 12 bp, Artificial Sequence
  Oligonucleotide primer for the detection of SNP TSC0064384
agtgaggagaat

SEQ ID NO: 381479 - DNA, 12 bp, Artificial Sequence
  Oligonucleotide primer for the detection of SNP TSC0064384
gaaagaatttaa

SEQ ID NO: 381480 - DNA, 12 bp, Artificial Sequence
  Oligonucleotide primer for the detection of SNP TSC0064385
ataacaattaat

SEQ ID NO: 381481 - DNA, 12 bp, Artificial Sequence
  Oligonucleotide primer for the detection of SNP TSC0064385
gttagttattta

SEQ ID NO: 381482 - DNA, 12 bp, Artificial Sequence
  Oligonucleotide primer for the detection of SNP TSC0064387
caaaaaattaca

SEQ ID NO: 381483 - DNA, 12 bp, Artificial Sequence
  Oligonucleotide primer for the detection of SNP TSC0064387
ttcaaaacaatt

SEQ ID NO: 381484 - DNA, 12 bp, Artificial Sequence
  Oligonucleotide primer for the detection of SNP TSC0064387
tagagaattata

SEQ ID NO: 381485 - DNA, 12 bp, Artificial Sequence
  Oligonucleotide primer for the detection of SNP TSC0064388
cacaaaaaccca

SEQ ID NO: 381486 - DNA, 12 bp, Artificial Sequence
  Oligonucleotide primer for the detection of SNP TSC0064388
agtttttgaagt

SEQ ID NO: 381487 - DNA, 12 bp, Artificial Sequence
  Oligonucleotide primer for the detection of SNP TSC0064388
caacctttaaaa

SEQ ID NO: 381488 - DNA, 12 bp, Artificial Sequence
  Oligonucleotide primer for the detection of SNP TSC0064388
atatagaagttt

SEQ ID NO: 381489 - DNA, 12 bp, Artificial Sequence
  Oligonucleotide primer for the detection of SNP TSC0064389
acttaaaaaacc

SEQ ID NO: 381490 - DNA, 12 bp, Artificial Sequence
  Oligonucleotide primer for the detection of SNP TSC0064389
cctctttcttaa

SEQ ID NO: 381491 - DNA, 12 bp, Artificial Sequence
  Oligonucleotide primer for the detection of SNP TSC0064389
ttggaaaatttt

SEQ ID NO: 381492 - DNA, 12 bp, Artificial Sequence
  Oligonucleotide primer for the detection of SNP TSC0064390
ttgaaaaattag

SEQ ID NO: 381493 - DNA, 12 bp, Artificial Sequence
  Oligonucleotide primer for the detection of SNP TSC0064390
ttgtaatgaata

SEQ ID NO: 381494 - DNA, 12 bp, Artificial Sequence
  Oligonucleotide primer for the detection of SNP TSC0064391
ctcctctttttt

SEQ ID NO: 381495 - DNA, 12 bp, Artificial Sequence
  Oligonucleotide primer for the detection of SNP TSC0064391
ataaattttaaa

SEQ ID NO: 381496 - DNA, 12 bp, Artificial Sequence
  Oligonucleotide primer for the detection of SNP TSC0064392
caatatttcaat

SEQ ID NO: 381497 - DNA, 12 bp, Artificial Sequence
  Oligonucleotide primer for the detection of SNP TSC0064392
atttggttttag

SEQ ID NO: 381498 - DNA, 12 bp, Artificial Sequence
  Oligonucleotide primer for the detection of SNP TSC0064392
acttaattttaa

SEQ ID NO: 381499 - DNA, 12 bp, Artificial Sequence
  Oligonucleotide primer for the detection of SNP TSC0064393
acacaatattct

SEQ ID NO: 381500 - DNA, 12 bp, Artificial Sequence
  Oligonucleotide primer for the detection of SNP TSC0064393
tttataggatta

SEQ ID NO: 381501 - DNA, 12 bp, Artificial Sequence
  Oligonucleotide primer for the detection of SNP TSC0064394
ctcctcaaccta

SEQ ID NO: 381502 - DNA, 12 bp, Artificial Sequence
  Oligonucleotide primer for the detection of SNP TSC0064394
cccaactccccc

SEQ ID NO: 381503 - DNA, 12 bp, Artificial Sequence
  Oligonucleotide primer for the detection of SNP TSC0064394
cccgactccccc

SEQ ID NO: 381504 - DNA, 12 bp, Artificial Sequence
  Oligonucleotide primer for the detection of SNP TSC0064395
aatattaaaaaa

SEQ ID NO: 381505 - DNA, 12 bp, Artificial Sequence
  Oligonucleotide primer for the detection of SNP TSC0064395
gaaagataagag

SEQ ID NO: 381506 - DNA, 12 bp, Artificial Sequence
  Oligonucleotide primer for the detection of SNP TSC0064395
ggtattaaaaaa

SEQ ID NO: 381507 - DNA, 12 bp, Artificial Sequence
  Oligonucleotide primer for the detection of SNP TSC0064396
taaactctataa

SEQ ID NO: 381508 - DNA, 12 bp, Artificial Sequence
  Oligonucleotide primer for the detection of SNP TSC0064396
tcttaaaaaccc

SEQ ID NO: 381509 - DNA, 12 bp, Artificial Sequence
  Oligonucleotide primer for the detection of SNP TSC0064396
tgaattttatga

SEQ ID NO: 381510 - DNA, 12 bp, Artificial Sequence
  Oligonucleotide primer for the detection of SNP TSC0064398
taactataactt

SEQ ID NO: 381511 - DNA, 12 bp, Artificial Sequence
  Oligonucleotide primer for the detection of SNP TSC0064398
aatagttgttag

SEQ ID NO: 381512 - DNA, 12 bp, Artificial Sequence
  Oligonucleotide primer for the detection of SNP TSC0064399
aaaaacataatc

SEQ ID NO: 381513 - DNA, 12 bp, Artificial Sequence
  Oligonucleotide primer for the detection of SNP TSC0064399
aaaaacgtaatc

SEQ ID NO: 381514 - DNA, 12 bp, Artificial Sequence
  Oligonucleotide primer for the detection of SNP TSC0064399
gaaaacataatc

SEQ ID NO: 381515 - DNA, 12 bp, Artificial Sequence
  Oligonucleotide primer for the detection of SNP TSC0064399
gaaaacgtaatc

SEQ ID NO: 381516 - DNA, 12 bp, Artificial Sequence
  Oligonucleotide primer for the detection of SNP TSC0064399
ttattgagttac

SEQ ID NO: 381517 - DNA, 12 bp, Artificial Sequence
  Oligonucleotide primer for the detection of SNP TSC0064399
ccactaaaccac

SEQ ID NO: 381518 - DNA, 12 bp, Artificial Sequence
  Oligonucleotide primer for the detection of SNP TSC0064399
gaagtgtgattt

SEQ ID NO: 381519 - DNA, 12 bp, Artificial Sequence
  Oligonucleotide primer for the detection of SNP TSC0064399
gaagcgtgattt

SEQ ID NO: 381520 - DNA, 12 bp, Artificial Sequence
  Oligonukleotid-Primer
ctccatctacca

SEQ ID NO: 381521 - DNA, 12 bp, Artificial Sequence
  Oligonucleotide primer for the detection of SNP TSC0064400
tgaaaaagattt

SEQ ID NO: 381522 - DNA, 12 bp, Artificial Sequence
  Oligonucleotide primer for the detection of SNP TSC0064401
ttttacataaat

SEQ ID NO: 381523 - DNA, 12 bp, Artificial Sequence
  Oligonucleotide primer for the detection of SNP TSC0064401
agatttataaga

SEQ ID NO: 381524 - DNA, 12 bp, Artificial Sequence
  Oligonukleotid-Primer
aaaactcaacta

SEQ ID NO: 381525 - DNA, 12 bp, Artificial Sequence
  Oligonucleotide primer for the detection of SNP TSC0064403
tgaagtaagttt

SEQ ID NO: 381526 - DNA, 12 bp, Artificial Sequence
  Oligonucleotide primer for the detection of SNP TSC0064403
agaatttagttg

SEQ ID NO: 381527 - DNA, 12 bp, Artificial Sequence
  Oligonucleotide primer for the detection of SNP TSC0064404
ccttaaataact

SEQ ID NO: 381528 - DNA, 12 bp, Artificial Sequence
  Oligonucleotide primer for the detection of SNP TSC0064404
attttttggatg

SEQ ID NO: 381529 - DNA, 12 bp, Artificial Sequence
  Oligonucleotide primer for the detection of SNP TSC0064405
atttcccaaaac

SEQ ID NO: 381530 - DNA, 12 bp, Artificial Sequence
  Oligonucleotide primer for the detection of SNP TSC0064405
ctaaatccaaaa

SEQ ID NO: 381531 - DNA, 12 bp, Artificial Sequence
  Oligonucleotide primer for the detection of SNP TSC0004678
catttttatact

SEQ ID NO: 381532 - DNA, 12 bp, Artificial Sequence
  Oligonucleotide primer for the detection of SNP TSC0004678
tattttgaatta

SEQ ID NO: 381533 - DNA, 12 bp, Artificial Sequence
  Oligonucleotide primer for the detection of SNP TSC0064408
ccctaaacacta

SEQ ID NO: 381534 - DNA, 12 bp, Artificial Sequence
  Oligonucleotide primer for the detection of SNP TSC0064408
ttttcttatcct

SEQ ID NO: 381535 - DNA, 12 bp, Artificial Sequence
  Oligonucleotide primer for the detection of SNP TSC0064409
caactaaatcct

SEQ ID NO: 381536 - DNA, 12 bp, Artificial Sequence
  Oligonucleotide primer for the detection of SNP TSC0064409
tggtttgtttaa

SEQ ID NO: 381537 - DNA, 12 bp, Artificial Sequence
  Oligonucleotide primer for the detection of SNP TSC0064410
tataaaaatatc

SEQ ID NO: 381538 - DNA, 12 bp, Artificial Sequence
  Oligonucleotide primer for the detection of SNP TSC0064410
gggaaatatggt

SEQ ID NO: 381539 - DNA, 12 bp, Artificial Sequence
  Oligonucleotide primer for the detection of SNP TSC0064410
gtaaagatgttt

SEQ ID NO: 381540 - DNA, 12 bp, Artificial Sequence
  Oligonucleotide primer for the detection of SNP TSC0064414
taaatacatata

SEQ ID NO: 381541 - DNA, 12 bp, Artificial Sequence
  Oligonucleotide primer for the detection of SNP TSC0064414
taaatgtatata

SEQ ID NO: 381542 - DNA, 12 bp, Artificial Sequence
  Oligonucleotide primer for the detection of SNP TSC0064415
taatatattttg

SEQ ID NO: 381543 - DNA, 12 bp, Artificial Sequence
  Oligonucleotide primer for the detection of SNP TSC0064416
caaccacaaatt

SEQ ID NO: 381544 - DNA, 12 bp, Artificial Sequence
  Oligonucleotide primer for the detection of SNP TSC0064416
cgaccacaaatt

SEQ ID NO: 381545 - DNA, 12 bp, Artificial Sequence
  Oligonucleotide primer for the detection of SNP TSC0064416
tagttttgtaaa

SEQ ID NO: 381546 - DNA, 12 bp, Artificial Sequence
  Oligonucleotide primer for the detection of SNP TSC0064416
tagtttcgtaaa

SEQ ID NO: 381547 - DNA, 12 bp, Artificial Sequence
  Oligonucleotide primer for the detection of SNP TSC0064417
taaaaatttatt

SEQ ID NO: 381548 - DNA, 12 bp, Artificial Sequence
  Oligonucleotide primer for the detection of SNP TSC0064417
tttgagtgttta

SEQ ID NO: 381549 - DNA, 12 bp, Artificial Sequence
  Oligonucleotide primer for the detection of SNP TSC0064418
gaatgatatgta

SEQ ID NO: 381550 - DNA, 12 bp, Artificial Sequence
  Oligonucleotide primer for the detection of SNP TSC0064418
ggagtggttaga

SEQ ID NO: 381551 - DNA, 12 bp, Artificial Sequence
  Oligonucleotide primer for the detection of SNP TSC0064419
tagatgtttaaa

SEQ ID NO: 381552 - DNA, 12 bp, Artificial Sequence
  Oligonucleotide primer for the detection of SNP TSC0064419
ggaaggttattt

SEQ ID NO: 381553 - DNA, 12 bp, Artificial Sequence
  Oligonucleotide primer for the detection of SNP TSC0064420
tttatacaaaaa

SEQ ID NO: 381554 - DNA, 12 bp, Artificial Sequence
  Oligonucleotide primer for the detection of SNP TSC0064420
atataaaattta

SEQ ID NO: 381555 - DNA, 12 bp, Artificial Sequence
  Oligonucleotide primer for the detection of SNP TSC0064422
ttctaaataacc

SEQ ID NO: 381556 - DNA, 12 bp, Artificial Sequence
  Oligonucleotide primer for the detection of SNP TSC0064422
tttgttaatagt

SEQ ID NO: 381557 - DNA, 12 bp, Artificial Sequence
  Oligonucleotide primer for the detection of SNP TSC0064422
cttattaacaac

SEQ ID NO: 381558 - DNA, 12 bp, Artificial Sequence
  Oligonucleotide primer for the detection of SNP TSC0064422
ttttgaatagtt

SEQ ID NO: 381559 - DNA, 12 bp, Artificial Sequence
  Oligonucleotide primer for the detection of SNP TSC0005119
tctaaatacaaa

SEQ ID NO: 381560 - DNA, 12 bp, Artificial Sequence
  Oligonucleotide primer for the detection of SNP TSC0005119
ggagatgaagaa

SEQ ID NO: 381561 - DNA, 12 bp, Artificial Sequence
  Oligonucleotide primer for the detection of SNP TSC0064423
ctaaatcaaatc

SEQ ID NO: 381562 - DNA, 12 bp, Artificial Sequence
  Oligonucleotide primer for the detection of SNP TSC0064423
ataaaattagta

SEQ ID NO: 381563 - DNA, 12 bp, Artificial Sequence
  Oligonucleotide primer for the detection of SNP TSC0064424
ataacctaaccc

SEQ ID NO: 381564 - DNA, 12 bp, Artificial Sequence
  Oligonucleotide primer for the detection of SNP TSC0064424
gtaacctaaccc

SEQ ID NO: 381565 - DNA, 12 bp, Artificial Sequence
  Oligonucleotide primer for the detection of SNP TSC0064426
gatttgttttgt

SEQ ID NO: 381566 - DNA, 12 bp, Artificial Sequence
  Oligonucleotide primer for the detection of SNP TSC0064426
aacttattctat

SEQ ID NO: 381567 - DNA, 12 bp, Artificial Sequence
  Oligonucleotide primer for the detection of SNP TSC0064426
tagaaggtaggg

SEQ ID NO: 381568 - DNA, 12 bp, Artificial Sequence
  Oligonucleotide primer for the detection of SNP TSC0064428
taacattcacct

SEQ ID NO: 381569 - DNA, 12 bp, Artificial Sequence
  Oligonucleotide primer for the detection of SNP TSC0064428
taacattcgcct

SEQ ID NO: 381570 - DNA, 12 bp, Artificial Sequence
  Oligonucleotide primer for the detection of SNP TSC0064428
aactaaattaca

SEQ ID NO: 381571 - DNA, 12 bp, Artificial Sequence
  Oligonucleotide primer for the detection of SNP TSC0064428
taatatttgttt

SEQ ID NO: 381572 - DNA, 12 bp, Artificial Sequence
  Oligonucleotide primer for the detection of SNP TSC0064428
taatattcgttt

SEQ ID NO: 381573 - DNA, 12 bp, Artificial Sequence
  Oligonucleotide primer for the detection of SNP TSC0064431
tcaacaccacat

SEQ ID NO: 381574 - DNA, 12 bp, Artificial Sequence
  Oligonucleotide primer for the detection of SNP TSC0064431
tcaacgccacat

SEQ ID NO: 381575 - DNA, 12 bp, Artificial Sequence
  Oligonucleotide primer for the detection of SNP TSC0064432
aacataccctat

SEQ ID NO: 381576 - DNA, 12 bp, Artificial Sequence
  Oligonucleotide primer for the detection of SNP TSC0064432
agttaatgtata

SEQ ID NO: 381577 - DNA, 12 bp, Artificial Sequence
  Oligonucleotide primer for the detection of SNP TSC0064432
agttaacgtata

SEQ ID NO: 381578 - DNA, 12 bp, Artificial Sequence
  Oligonucleotide primer for the detection of SNP TSC0064434
aggggttttaaa

SEQ ID NO: 381579 - DNA, 12 bp, Artificial Sequence
  Oligonucleotide primer for the detection of SNP TSC0064440
ttaaccattctt

SEQ ID NO: 381580 - DNA, 12 bp, Artificial Sequence
  Oligonucleotide primer for the detection of SNP TSC0064440
tattagagtaga

SEQ ID NO: 381581 - DNA, 12 bp, Artificial Sequence
  Oligonucleotide primer for the detection of SNP TSC0064440
tactaaaacaaa

SEQ ID NO: 381582 - DNA, 12 bp, Artificial Sequence
  Oligonucleotide primer for the detection of SNP TSC0064441
ccttccttactt

SEQ ID NO: 381583 - DNA, 12 bp, Artificial Sequence
  Oligonucleotide primer for the detection of SNP TSC0064441
taaatggagagg

SEQ ID NO: 381584 - DNA, 12 bp, Artificial Sequence
  Oligonucleotide primer for the detection of SNP TSC0004784
atcatattttca

SEQ ID NO: 381585 - DNA, 12 bp, Artificial Sequence
  Oligonucleotide primer for the detection of SNP TSC0004784
attttcaactca

SEQ ID NO: 381586 - DNA, 12 bp, Artificial Sequence
  Oligonucleotide primer for the detection of SNP TSC0064444
taattactaaat

SEQ ID NO: 381587 - DNA, 12 bp, Artificial Sequence
  Oligonucleotide primer for the detection of SNP TSC0064444
aattaatttata

SEQ ID NO: 381588 - DNA, 12 bp, Artificial Sequence
  Oligonucleotide primer for the detection of SNP TSC0064444
tggttgttgagt

SEQ ID NO: 381589 - DNA, 12 bp, Artificial Sequence
  Oligonucleotide primer for the detection of SNP TSC0064445
ggtggattgttt

SEQ ID NO: 381590 - DNA, 12 bp, Artificial Sequence
  Oligonucleotide primer for the detection of SNP TSC0064445
caaaataaatta

SEQ ID NO: 381591 - DNA, 12 bp, Artificial Sequence
  Oligonucleotide primer for the detection of SNP TSC0064445
aaaatagatagg

SEQ ID NO: 381592 - DNA, 12 bp, Artificial Sequence
  Oligonucleotide primer for the detection of SNP TSC0064446
acaaacttcctt

SEQ ID NO: 381593 - DNA, 12 bp, Artificial Sequence
  Oligonucleotide primer for the detection of SNP TSC0064446
tataaagagaaa

SEQ ID NO: 381594 - DNA, 12 bp, Artificial Sequence
  Oligonucleotide primer for the detection of SNP TSC0064447
cttaccaattca

SEQ ID NO: 381595 - DNA, 12 bp, Artificial Sequence
  Oligonucleotide primer for the detection of SNP TSC0064451
tataaacatcat

SEQ ID NO: 381596 - DNA, 12 bp, Artificial Sequence
  Oligonucleotide primer for the detection of SNP TSC0064451
aaaaaaaatttg

SEQ ID NO: 381597 - DNA, 12 bp, Artificial Sequence
  Oligonucleotide primer for the detection of SNP TSC0064452
atcaacaatttt

SEQ ID NO: 381598 - DNA, 12 bp, Artificial Sequence
  Oligonucleotide primer for the detection of SNP TSC0064452
atcgacaatttt

SEQ ID NO: 381599 - DNA, 12 bp, Artificial Sequence
  Oligonucleotide primer for the detection of SNP TSC0064452
gggtagagaaag

SEQ ID NO: 381600 - DNA, 12 bp, Artificial Sequence
  Oligonucleotide primer for the detection of SNP TSC0005931
attaataacaac

SEQ ID NO: 381601 - DNA, 12 bp, Artificial Sequence
  Oligonucleotide primer for the detection of SNP TSC0005931
attaataacgac

SEQ ID NO: 381602 - DNA, 12 bp, Artificial Sequence
  Oligonucleotide primer for the detection of SNP TSC0005931
atattgtgaata

SEQ ID NO: 381603 - DNA, 12 bp, Artificial Sequence
  Oligonucleotide primer for the detection of SNP TSC0064455
acaacactcctt

SEQ ID NO: 381604 - DNA, 12 bp, Artificial Sequence
  Oligonucleotide primer for the detection of SNP TSC0064455
gagggaagagga

SEQ ID NO: 381605 - DNA, 12 bp, Artificial Sequence
  Oligonucleotide primer for the detection of SNP TSC0064457
ataaaaagggaa

SEQ ID NO: 381606 - DNA, 12 bp, Artificial Sequence
  Oligonucleotide primer for the detection of SNP TSC0064458
aaataaattctc

SEQ ID NO: 381607 - DNA, 12 bp, Artificial Sequence
  Oligonucleotide primer for the detection of SNP TSC0064458
tattgaaaagtt

SEQ ID NO: 381608 - DNA, 12 bp, Artificial Sequence
  Oligonucleotide primer for the detection of SNP TSC0064458
tatcgaaaagtt

SEQ ID NO: 381609 - DNA, 12 bp, Artificial Sequence
  Oligonucleotide primer for the detection of SNP TSC0064458
caccaaaaaacc

SEQ ID NO: 381610 - DNA, 12 bp, Artificial Sequence
  Oligonucleotide primer for the detection of SNP TSC0064458
caccgaaaaacc

SEQ ID NO: 381611 - DNA, 12 bp, Artificial Sequence
  Oligonucleotide primer for the detection of SNP TSC0064458
aaatggattttt

SEQ ID NO: 381612 - DNA, 12 bp, Artificial Sequence
  Oligonucleotide primer for the detection of SNP TSC0064459
acacataaccaa

SEQ ID NO: 381613 - DNA, 12 bp, Artificial Sequence
  Oligonucleotide primer for the detection of SNP TSC0064459
gtggtatgttat

SEQ ID NO: 381614 - DNA, 12 bp, Artificial Sequence
  Oligonucleotide primer for the detection of SNP TSC0064459
ataacatattac

SEQ ID NO: 381615 - DNA, 12 bp, Artificial Sequence
  Oligonucleotide primer for the detection of SNP TSC0064459
atatatggttaa

SEQ ID NO: 381616 - DNA, 12 bp, Artificial Sequence
  Oligonucleotide primer for the detection of SNP TSC0008185
ggtatgttggtg

SEQ ID NO: 381617 - DNA, 12 bp, Artificial Sequence
  Oligonucleotide primer for the detection of SNP TSC0008185
aacatattaata

SEQ ID NO: 381618 - DNA, 12 bp, Artificial Sequence
  Oligonucleotide primer for the detection of SNP TSC0008185
gggattataaac

SEQ ID NO: 381619 - DNA, 12 bp, Artificial Sequence
  Oligonucleotide primer for the detection of SNP TSC0064462
tacaattaaatt

SEQ ID NO: 381620 - DNA, 12 bp, Artificial Sequence
  Oligonucleotide primer for the detection of SNP TSC0064463
caatctaaaaac

SEQ ID NO: 381621 - DNA, 12 bp, Artificial Sequence
  Oligonucleotide primer for the detection of SNP TSC0064464
ataataactaat

SEQ ID NO: 381622 - DNA, 12 bp, Artificial Sequence
  Oligonucleotide primer for the detection of SNP TSC0064464
taatgtatttta

SEQ ID NO: 381623 - DNA, 12 bp, Artificial Sequence
  Oligonucleotide primer for the detection of SNP TSC0005131
tctacccactct

SEQ ID NO: 381624 - DNA, 12 bp, Artificial Sequence
  Oligonucleotide primer for the detection of SNP TSC0005131
aaaaatgggaaa

SEQ ID NO: 381625 - DNA, 12 bp, Artificial Sequence
  Oligonucleotide primer for the detection of SNP TSC0005132
attaatataact

SEQ ID NO: 381626 - DNA, 12 bp, Artificial Sequence
  Oligonucleotide primer for the detection of SNP TSC0005132
tttatggattta

SEQ ID NO: 381627 - DNA, 12 bp, Artificial Sequence
  Oligonucleotide primer for the detection of SNP TSC0064465
acacaaaacaat

SEQ ID NO: 381628 - DNA, 12 bp, Artificial Sequence
  Oligonucleotide primer for the detection of SNP TSC0064465
ttgtatattttg

SEQ ID NO: 381629 - DNA, 12 bp, Artificial Sequence
  Oligonucleotide primer for the detection of SNP TSC0064466
atcatacatact

SEQ ID NO: 381630 - DNA, 12 bp, Artificial Sequence
  Oligonucleotide primer for the detection of SNP TSC0064466
aatccacacata

SEQ ID NO: 381631 - DNA, 12 bp, Artificial Sequence
  Oligonucleotide primer for the detection of SNP TSC0064467
gaggagaaggtg

SEQ ID NO: 381632 - DNA, 12 bp, Artificial Sequence
  Oligonucleotide primer for the detection of SNP TSC0064468
aaataaacctat

SEQ ID NO: 381633 - DNA, 12 bp, Artificial Sequence
  Oligonucleotide primer for the detection of SNP TSC0064468
tgtttaaggaaa

SEQ ID NO: 381634 - DNA, 12 bp, Artificial Sequence
  Oligonucleotide primer for the detection of SNP TSC0064469
attatagtaagt

SEQ ID NO: 381635 - DNA, 12 bp, Artificial Sequence
  Oligonucleotide primer for the detection of SNP TSC0064469
gaggtgaagaag

SEQ ID NO: 381636 - DNA, 12 bp, Artificial Sequence
  Oligonucleotide primer for the detection of SNP TSC0064469
gaggcgaagaag

SEQ ID NO: 381637 - DNA, 12 bp, Artificial Sequence
  Oligonucleotide primer for the detection of SNP TSC0064470
ttagtgataagt

SEQ ID NO: 381638 - DNA, 12 bp, Artificial Sequence
  Oligonucleotide primer for the detection of SNP TSC0064470
ttagcgataagt

SEQ ID NO: 381639 - DNA, 12 bp, Artificial Sequence
  Oligonucleotide primer for the detection of SNP TSC0064470
ttaacgataaat

SEQ ID NO: 381640 - DNA, 12 bp, Artificial Sequence
  Oligonucleotide primer for the detection of SNP TSC0064470
gggaatttggtt

SEQ ID NO: 381641 - DNA, 12 bp, Artificial Sequence
  Oligonucleotide primer for the detection of SNP TSC0064471
gagaaaatgttg

SEQ ID NO: 381642 - DNA, 12 bp, Artificial Sequence
  Oligonucleotide primer for the detection of SNP TSC0005374
gttttggtaatt

SEQ ID NO: 381643 - DNA, 12 bp, Artificial Sequence
  Oligonucleotide primer for the detection of SNP TSC0005374
actttaataatc

SEQ ID NO: 381644 - DNA, 12 bp, Artificial Sequence
  Oligonucleotide primer for the detection of SNP TSC0005374
gttagtattagg

SEQ ID NO: 381645 - DNA, 12 bp, Artificial Sequence
  Oligonucleotide primer for the detection of SNP TSC0064472
aataatagttaa

SEQ ID NO: 381646 - DNA, 12 bp, Artificial Sequence
  Oligonucleotide primer for the detection of SNP TSC0064472
gaggtttatgtt

SEQ ID NO: 381647 - DNA, 12 bp, Artificial Sequence
  Oligonucleotide primer for the detection of SNP TSC0004677
caatacataaca

SEQ ID NO: 381648 - DNA, 12 bp, Artificial Sequence
  Oligonucleotide primer for the detection of SNP TSC0004677
aataatgtagtt

SEQ ID NO: 381649 - DNA, 12 bp, Artificial Sequence
  Oligonucleotide primer for the detection of SNP TSC0004677
aataacgtagtt

SEQ ID NO: 381650 - DNA, 12 bp, Artificial Sequence
  Oligonucleotide primer for the detection of SNP TSC0004677
aataacataacc

SEQ ID NO: 381651 - DNA, 12 bp, Artificial Sequence
  Oligonucleotide primer for the detection of SNP TSC0004677
aataacgtaacc

SEQ ID NO: 381652 - DNA, 12 bp, Artificial Sequence
  Oligonucleotide primer for the detection of SNP TSC0064474
ctctattctact

SEQ ID NO: 381653 - DNA, 12 bp, Artificial Sequence
  Oligonucleotide primer for the detection of SNP TSC0064475
taaatcataaac

SEQ ID NO: 381654 - DNA, 12 bp, Artificial Sequence
  Oligonucleotide primer for the detection of SNP TSC0064475
taggtgaataga

SEQ ID NO: 381655 - DNA, 12 bp, Artificial Sequence
  Oligonucleotide primer for the detection of SNP TSC0064475
taggcgaataga

SEQ ID NO: 381656 - DNA, 12 bp, Artificial Sequence
  Oligonucleotide primer for the detection of SNP TSC0064476
ataatttattat

SEQ ID NO: 381657 - DNA, 12 bp, Artificial Sequence
  Oligonucleotide primer for the detection of SNP TSC0064476
ataatttattac

SEQ ID NO: 381658 - DNA, 12 bp, Artificial Sequence
  Oligonucleotide primer for the detection of SNP TSC0000105
ctcaaaactaat

SEQ ID NO: 381659 - DNA, 12 bp, Artificial Sequence
  Oligonucleotide primer for the detection of SNP TSC0000105
gaaaggtttgag

SEQ ID NO: 381660 - DNA, 12 bp, Artificial Sequence
  Oligonucleotide primer for the detection of SNP TSC0000560
actttccaacaa

SEQ ID NO: 381661 - DNA, 12 bp, Artificial Sequence
  Oligonucleotide primer for the detection of SNP TSC0000560
gttgggggggaa

SEQ ID NO: 381662 - DNA, 12 bp, Artificial Sequence
  Oligonucleotide primer for the detection of SNP TSC0000560
gtcgggggggaa

SEQ ID NO: 381663 - DNA, 12 bp, Artificial Sequence
  Oligonucleotide primer for the detection of SNP TSC0000561
acctttaatcta

SEQ ID NO: 381664 - DNA, 12 bp, Artificial Sequence
  Oligonucleotide primer for the detection of SNP TSC0000561
gttaaattagtt

SEQ ID NO: 381665 - DNA, 12 bp, Artificial Sequence
  Oligonucleotide primer for the detection of SNP TSC0000561
gttaaattagtc

SEQ ID NO: 381666 - DNA, 12 bp, Artificial Sequence
  Oligonucleotide primer for the detection of SNP TSC0000561
actaaattaacc

SEQ ID NO: 381667 - DNA, 12 bp, Artificial Sequence
  Oligonucleotide primer for the detection of SNP TSC0064478
acaaaatatcac

SEQ ID NO: 381668 - DNA, 12 bp, Artificial Sequence
  Oligonucleotide primer for the detection of SNP TSC0064478
tagggtattatt

SEQ ID NO: 381669 - DNA, 12 bp, Artificial Sequence
  Oligonucleotide primer for the detection of SNP TSC0064479
tggttataattt

SEQ ID NO: 381670 - DNA, 12 bp, Artificial Sequence
  Oligonucleotide primer for the detection of SNP TSC0064479
taattataatct

SEQ ID NO: 381671 - DNA, 12 bp, Artificial Sequence
  Oligonucleotide primer for the detection of SNP TSC0064479
ggataggagaga

SEQ ID NO: 381672 - DNA, 12 bp, Artificial Sequence
  Oligonucleotide primer for the detection of SNP TSC0064480
ttggttataatt

SEQ ID NO: 381673 - DNA, 12 bp, Artificial Sequence
  Oligonucleotide primer for the detection of SNP TSC0064481
ataataatttct

SEQ ID NO: 381674 - DNA, 12 bp, Artificial Sequence
  Oligonucleotide primer for the detection of SNP TSC0064481
tggagatttgta

SEQ ID NO: 381675 - DNA, 12 bp, Artificial Sequence
  Oligonucleotide primer for the detection of SNP TSC0064481
cggagatttgta

SEQ ID NO: 381676 - DNA, 12 bp, Artificial Sequence
  Oligonucleotide primer for the detection of SNP TSC0064482
aatacaaatctc

SEQ ID NO: 381677 - DNA, 12 bp, Artificial Sequence
  Oligonucleotide primer for the detection of SNP TSC0064483
aattgtttaatg

SEQ ID NO: 381678 - DNA, 12 bp, Artificial Sequence
  Oligonucleotide primer for the detection of SNP TSC0064484
ttagaagatttt

SEQ ID NO: 381679 - DNA, 12 bp, Artificial Sequence
  Oligonucleotide primer for the detection of SNP TSC0064484
caaaaaatttta

SEQ ID NO: 381680 - DNA, 12 bp, Artificial Sequence
  Oligonucleotide primer for the detection of SNP TSC0064484
taagtaaaagta

SEQ ID NO: 381681 - DNA, 12 bp, Artificial Sequence
  Oligonucleotide primer for the detection of SNP TSC0001014
ttttccctatct

SEQ ID NO: 381682 - DNA, 12 bp, Artificial Sequence
  Oligonucleotide primer for the detection of SNP TSC0001014
tggatgtgaaat

SEQ ID NO: 381683 - DNA, 12 bp, Artificial Sequence
  Oligonucleotide primer for the detection of SNP TSC0064485
attatcacaatt

SEQ ID NO: 381684 - DNA, 12 bp, Artificial Sequence
  Oligonucleotide primer for the detection of SNP TSC0064485
attatcacgatt

SEQ ID NO: 381685 - DNA, 12 bp, Artificial Sequence
  Oligonucleotide primer for the detection of SNP TSC0064485
cttcttatacca

SEQ ID NO: 381686 - DNA, 12 bp, Artificial Sequence
  Oligonucleotide primer for the detection of SNP TSC0064485
cttcttataccg

SEQ ID NO: 381687 - DNA, 12 bp, Artificial Sequence
  Oligonucleotide primer for the detection of SNP TSC0064485
tgttacgatttt

SEQ ID NO: 381688 - DNA, 12 bp, Artificial Sequence
  Oligonucleotide primer for the detection of SNP TSC0064486
taataccccaat

SEQ ID NO: 381689 - DNA, 12 bp, Artificial Sequence
  Oligonucleotide primer for the detection of SNP TSC0064487
aacttcttcacc

SEQ ID NO: 381690 - DNA, 12 bp, Artificial Sequence
  Oligonucleotide primer for the detection of SNP TSC0064487
ctatttatccct

SEQ ID NO: 381691 - DNA, 12 bp, Artificial Sequence
  Oligonucleotide primer for the detection of SNP TSC0064488
tgatatagtttg

SEQ ID NO: 381692 - DNA, 12 bp, Artificial Sequence
  Oligonucleotide primer for the detection of SNP TSC0064488
cgatatagtttg

SEQ ID NO: 381693 - DNA, 12 bp, Artificial Sequence
  Oligonucleotide primer for the detection of SNP TSC0064489
cccccttcctat

SEQ ID NO: 381694 - DNA, 12 bp, Artificial Sequence
  Oligonucleotide primer for the detection of SNP TSC0064489
gaagtgtgttag

SEQ ID NO: 381695 - DNA, 12 bp, Artificial Sequence
  Oligonucleotide primer for the detection of SNP TSC0064491
aaactatattac

SEQ ID NO: 381696 - DNA, 12 bp, Artificial Sequence
  Oligonucleotide primer for the detection of SNP TSC0064491
gtgttatggtga

SEQ ID NO: 381697 - DNA, 12 bp, Artificial Sequence
  Oligonucleotide primer for the detection of SNP TSC0064492
tcctcaacaaat

SEQ ID NO: 381698 - DNA, 12 bp, Artificial Sequence
  Oligonucleotide primer for the detection of SNP TSC0064492
tatattatttag

SEQ ID NO: 381699 - DNA, 12 bp, Artificial Sequence
  Oligonucleotide primer for the detection of SNP TSC0064493
taaaatctaact

SEQ ID NO: 381700 - DNA, 12 bp, Artificial Sequence
  Oligonucleotide primer for the detection of SNP TSC0064493
caaacttaactc

SEQ ID NO: 381701 - DNA, 12 bp, Artificial Sequence
  Oligonucleotide primer for the detection of SNP TSC0064493
agagtttgattt

SEQ ID NO: 381702 - DNA, 12 bp, Artificial Sequence
  Oligonucleotide primer for the detection of SNP TSC0064493
agagtttgattc

SEQ ID NO: 381703 - DNA, 12 bp, Artificial Sequence
  Oligonucleotide primer for the detection of SNP TSC0064494
gggggagtttta

SEQ ID NO: 381704 - DNA, 12 bp, Artificial Sequence
  Oligonucleotide primer for the detection of SNP TSC0064494
gagagtttgtgt

SEQ ID NO: 381705 - DNA, 12 bp, Artificial Sequence
  Oligonucleotide primer for the detection of SNP TSC0064495
aatttcctcact

SEQ ID NO: 381706 - DNA, 12 bp, Artificial Sequence
  Oligonucleotide primer for the detection of SNP TSC0064496
tccacaacaact

SEQ ID NO: 381707 - DNA, 12 bp, Artificial Sequence
  Oligonucleotide primer for the detection of SNP TSC0064496
aagtaaaatggg

SEQ ID NO: 381708 - DNA, 12 bp, Artificial Sequence
  Oligonucleotide primer for the detection of SNP TSC0000378
aaacaattttct

SEQ ID NO: 381709 - DNA, 12 bp, Artificial Sequence
  Oligonucleotide primer for the detection of SNP TSC0000378
ttagggagtttg

SEQ ID NO: 381710 - DNA, 12 bp, Artificial Sequence
  Oligonucleotide primer for the detection of SNP TSC0064501
tatcgtttgtta

SEQ ID NO: 381711 - DNA, 12 bp, Artificial Sequence
  Oligonucleotide primer for the detection of SNP TSC0064501
catcacctatca

SEQ ID NO: 381712 - DNA, 12 bp, Artificial Sequence
  Oligonucleotide primer for the detection of SNP TSC0064501
catcgcctatca

SEQ ID NO: 381713 - DNA, 12 bp, Artificial Sequence
  Oligonucleotide primer for the detection of SNP TSC0064502
attttaaacaac

SEQ ID NO: 381714 - DNA, 12 bp, Artificial Sequence
  Oligonucleotide primer for the detection of SNP TSC0064502
ttgagttttata

SEQ ID NO: 381715 - DNA, 12 bp, Artificial Sequence
  Oligonucleotide primer for the detection of SNP TSC0064503
agtagttgtgga

SEQ ID NO: 381716 - DNA, 12 bp, Artificial Sequence
  Oligonucleotide primer for the detection of SNP TSC0064503
aacaattataaa

SEQ ID NO: 381717 - DNA, 12 bp, Artificial Sequence
  Oligonucleotide primer for the detection of SNP TSC0064503
aggagtttttga

SEQ ID NO: 381718 - DNA, 12 bp, Artificial Sequence
  Oligonucleotide primer for the detection of SNP TSC0064504
aactaatcatat

SEQ ID NO: 381719 - DNA, 12 bp, Artificial Sequence
  Oligonucleotide primer for the detection of SNP TSC0064504
caacctatataa

SEQ ID NO: 381720 - DNA, 12 bp, Artificial Sequence
  Oligonucleotide primer for the detection of SNP TSC0064506
attaaaaaacct

SEQ ID NO: 381721 - DNA, 12 bp, Artificial Sequence
  Oligonucleotide primer for the detection of SNP TSC0064507
  unsure (1): unknown base
nttaataaaaaa

SEQ ID NO: 381722 - DNA, 12 bp, Artificial Sequence
  Oligonucleotide primer for the detection of SNP TSC0064507
atttgtggttta

SEQ ID NO: 381723 - DNA, 12 bp, Artificial Sequence
  Oligonucleotide primer for the detection of SNP TSC0064507
atctataattta

SEQ ID NO: 381724 - DNA, 12 bp, Artificial Sequence
  Oligonucleotide primer for the detection of SNP TSC0064507
ttagtgaaaagt

SEQ ID NO: 381725 - DNA, 12 bp, Artificial Sequence
  Oligonucleotide primer for the detection of SNP TSC0064507
ttagtgaaaagc

SEQ ID NO: 381726 - DNA, 12 bp, Artificial Sequence
  Oligonucleotide primer for the detection of SNP TSC0000090
ctctacccatta

SEQ ID NO: 381727 - DNA, 12 bp, Artificial Sequence
  Oligonucleotide primer for the detection of SNP TSC0000090
ttttaaaattgg

SEQ ID NO: 381728 - DNA, 12 bp, Artificial Sequence
  Oligonucleotide primer for the detection of SNP TSC0000090
ctttaaaactaa

SEQ ID NO: 381729 - DNA, 12 bp, Artificial Sequence
  Oligonucleotide primer for the detection of SNP TSC0064512
aaaacattccaa

SEQ ID NO: 381730 - DNA, 12 bp, Artificial Sequence
  Oligonucleotide primer for the detection of SNP TSC0064512
ttttagaagtag

SEQ ID NO: 381731 - DNA, 12 bp, Artificial Sequence
  Oligonucleotide primer for the detection of SNP TSC0064512
cttcaaaaataa

SEQ ID NO: 381732 - DNA, 12 bp, Artificial Sequence
  Oligonucleotide primer for the detection of SNP TSC0064512
gaaatattttag

SEQ ID NO: 381733 - DNA, 12 bp, Artificial Sequence
  Oligonucleotide primer for the detection of SNP TSC0064513
gccactacactc

SEQ ID NO: 381734 - DNA, 12 bp, Artificial Sequence
  Oligonucleotide primer for the detection of SNP TSC0064513
ttattgtttatg

SEQ ID NO: 381735 - DNA, 12 bp, Artificial Sequence
  Oligonucleotide primer for the detection of SNP TSC0064513
ttatcgtttatg

SEQ ID NO: 381736 - DNA, 12 bp, Artificial Sequence
  Oligonucleotide primer for the detection of SNP TSC0064515
aaaccaccgtac

SEQ ID NO: 381737 - DNA, 12 bp, Artificial Sequence
  Oligonucleotide primer for the detection of SNP TSC0064515
aaaagtagatta

SEQ ID NO: 381738 - DNA, 12 bp, Artificial Sequence
  Oligonucleotide primer for the detection of SNP TSC0064517
ctaaccaacttc

SEQ ID NO: 381739 - DNA, 12 bp, Artificial Sequence
  Oligonucleotide primer for the detection of SNP TSC0064517
ttttatagtata

SEQ ID NO: 381740 - DNA, 12 bp, Artificial Sequence
  Oligonucleotide primer for the detection of SNP TSC0064519
atattctaaaat

SEQ ID NO: 381741 - DNA, 12 bp, Artificial Sequence
  Oligonucleotide primer for the detection of SNP TSC0064519
attttggtaatt

SEQ ID NO: 381742 - DNA, 12 bp, Artificial Sequence
  Oligonucleotide primer for the detection of SNP TSC0064519
atcctaataatc

SEQ ID NO: 381743 - DNA, 12 bp, Artificial Sequence
  Oligonucleotide primer for the detection of SNP TSC0064519
atgttttaaaat

SEQ ID NO: 381744 - DNA, 12 bp, Artificial Sequence
  Oligonucleotide primer for the detection of SNP TSC0000410
attatcccttcc

SEQ ID NO: 381745 - DNA, 12 bp, Artificial Sequence
  Oligonucleotide primer for the detection of SNP TSC0000410
tagaaaatgaag

SEQ ID NO: 381746 - DNA, 12 bp, Artificial Sequence
  Oligonucleotide primer for the detection of SNP TSC0000411
agtttttaaatt

SEQ ID NO: 381747 - DNA, 12 bp, Artificial Sequence
  Oligonucleotide primer for the detection of SNP TSC0000411
actcttaaatca

SEQ ID NO: 381748 - DNA, 12 bp, Artificial Sequence
  Oligonucleotide primer for the detection of SNP TSC0000411
ttgaataattag

SEQ ID NO: 381749 - DNA, 12 bp, Artificial Sequence
  Oligonucleotide primer for the detection of SNP TSC0000900
ttcacaatatat

SEQ ID NO: 381750 - DNA, 12 bp, Artificial Sequence
  Oligonucleotide primer for the detection of SNP TSC0000900
gatgttttaata

SEQ ID NO: 381751 - DNA, 12 bp, Artificial Sequence
  Oligonucleotide primer for the detection of SNP TSC0001011
taccttaaatta

SEQ ID NO: 381752 - DNA, 12 bp, Artificial Sequence
  Oligonucleotide primer for the detection of SNP TSC0001011
taagattgtgtt

SEQ ID NO: 381753 - DNA, 12 bp, Artificial Sequence
  Oligonucleotide primer for the detection of SNP TSC0001011
tgttttgggttg

SEQ ID NO: 381754 - DNA, 12 bp, Artificial Sequence
  Oligonucleotide primer for the detection of SNP TSC0064521
tctaaaactctt

SEQ ID NO: 381755 - DNA, 12 bp, Artificial Sequence
  Oligonucleotide primer for the detection of SNP TSC0064521
ggatgttatttg

SEQ ID NO: 381756 - DNA, 12 bp, Artificial Sequence
  Oligonucleotide primer for the detection of SNP TSC0064522
ttttaattgttt

SEQ ID NO: 381757 - DNA, 12 bp, Artificial Sequence
  Oligonucleotide primer for the detection of SNP TSC0064522
ttttaatcgttt

SEQ ID NO: 381758 - DNA, 12 bp, Artificial Sequence
  Oligonucleotide primer for the detection of SNP TSC0064522
tcttaaccattt

SEQ ID NO: 381759 - DNA, 12 bp, Artificial Sequence
  Oligonucleotide primer for the detection of SNP TSC0064522
tcttaaccgttt

SEQ ID NO: 381760 - DNA, 12 bp, Artificial Sequence
  Oligonucleotide primer for the detection of SNP TSC0064522
gggaatttgaga

SEQ ID NO: 381761 - DNA, 12 bp, Artificial Sequence
  Oligonucleotide primer for the detection of SNP TSC0064523
tatggtattttg

SEQ ID NO: 381762 - DNA, 12 bp, Artificial Sequence
  Oligonucleotide primer for the detection of SNP TSC0064523
cataatatttta

SEQ ID NO: 381763 - DNA, 12 bp, Artificial Sequence
  Oligonucleotide primer for the detection of SNP TSC0064523
ggttgtttaatt

SEQ ID NO: 381764 - DNA, 12 bp, Artificial Sequence
  Oligonucleotide primer for the detection of SNP TSC0064524
gtagattaataa

SEQ ID NO: 381765 - DNA, 12 bp, Artificial Sequence
  Oligonucleotide primer for the detection of SNP TSC0064524
acaaattaacaa

SEQ ID NO: 381766 - DNA, 12 bp, Artificial Sequence
  Oligonucleotide primer for the detection of SNP TSC0064524
tgagaagatata

SEQ ID NO: 381767 - DNA, 12 bp, Artificial Sequence
  Oligonucleotide primer for the detection of SNP TSC0064525
atcctaataaaa

SEQ ID NO: 381768 - DNA, 12 bp, Artificial Sequence
  Oligonucleotide primer for the detection of SNP TSC0064525
tttaaaaaattg

SEQ ID NO: 381769 - DNA, 12 bp, Artificial Sequence
  Oligonucleotide primer for the detection of SNP TSC0064525
ttttgataaggt

SEQ ID NO: 381770 - DNA, 12 bp, Artificial Sequence
  Oligonucleotide primer for the detection of SNP TSC0064526
atactattcaat

SEQ ID NO: 381771 - DNA, 12 bp, Artificial Sequence
  Oligonucleotide primer for the detection of SNP TSC0064527
tgatatagtttt

SEQ ID NO: 381772 - DNA, 12 bp, Artificial Sequence
  Oligonucleotide primer for the detection of SNP TSC0064527
cgatatagtttt

SEQ ID NO: 381773 - DNA, 12 bp, Artificial Sequence
  Oligonucleotide primer for the detection of SNP TSC0064527
caatataacctt

SEQ ID NO: 381774 - DNA, 12 bp, Artificial Sequence
  Oligonucleotide primer for the detection of SNP TSC0064527
cgatataacctt

SEQ ID NO: 381775 - DNA, 12 bp, Artificial Sequence
  Oligonucleotide primer for the detection of SNP TSC0001397
ataatcacaata

SEQ ID NO: 381776 - DNA, 12 bp, Artificial Sequence
  Oligonucleotide primer for the detection of SNP TSC0001397
gtatatagtttc

SEQ ID NO: 381777 - DNA, 12 bp, Artificial Sequence
  Oligonucleotide primer for the detection of SNP TSC0000152
cctaataataac

SEQ ID NO: 381778 - DNA, 12 bp, Artificial Sequence
  Oligonucleotide primer for the detection of SNP TSC0000152
tagaaatagaaa

SEQ ID NO: 381779 - DNA, 12 bp, Artificial Sequence
  Oligonucleotide primer for the detection of SNP TSC0000152
tttgatagtagt

SEQ ID NO: 381780 - DNA, 12 bp, Artificial Sequence
  Oligonucleotide primer for the detection of SNP TSC0064540
ggagaaaagatt

SEQ ID NO: 381781 - DNA, 12 bp, Artificial Sequence
  Oligonucleotide primer for the detection of SNP TSC0064542
aatacatctact

SEQ ID NO: 381782 - DNA, 12 bp, Artificial Sequence
  Oligonucleotide primer for the detection of SNP TSC0064542
ttagaagtatgg

SEQ ID NO: 381783 - DNA, 12 bp, Artificial Sequence
  Oligonucleotide primer for the detection of SNP TSC0064543
tattctcaattt

SEQ ID NO: 381784 - DNA, 12 bp, Artificial Sequence
  Oligonucleotide primer for the detection of SNP TSC0064543
catattctctcc

SEQ ID NO: 381785 - DNA, 12 bp, Artificial Sequence
  Oligonucleotide primer for the detection of SNP TSC0064544
cacaactcttat

SEQ ID NO: 381786 - DNA, 12 bp, Artificial Sequence
  Oligonucleotide primer for the detection of SNP TSC0064549
tattattactat

SEQ ID NO: 381787 - DNA, 12 bp, Artificial Sequence
  Oligonucleotide primer for the detection of SNP TSC0064550
aacattaactca

SEQ ID NO: 381788 - DNA, 12 bp, Artificial Sequence
  Oligonucleotide primer for the detection of SNP TSC0064550
aacgttaactca

SEQ ID NO: 381789 - DNA, 12 bp, Artificial Sequence
  Oligonucleotide primer for the detection of SNP TSC0064550
tatttggagtta

SEQ ID NO: 381790 - DNA, 12 bp, Artificial Sequence
  Oligonucleotide primer for the detection of SNP TSC0064550
tagtgttggttt

SEQ ID NO: 381791 - DNA, 12 bp, Artificial Sequence
  Oligonucleotide primer for the detection of SNP TSC0064550
tagcgttggttt

SEQ ID NO: 381792 - DNA, 12 bp, Artificial Sequence
  Oligonucleotide primer for the detection of SNP TSC0064552
aaatatttaact

SEQ ID NO: 381793 - DNA, 12 bp, Artificial Sequence
  Oligonucleotide primer for the detection of SNP TSC0064552
aaatatttggtt

SEQ ID NO: 381794 - DNA, 12 bp, Artificial Sequence
  Oligonucleotide primer for the detection of SNP TSC0064553
ataatttctaat

SEQ ID NO: 381795 - DNA, 12 bp, Artificial Sequence
  Oligonucleotide primer for the detection of SNP TSC0064553
taaaatgaaaaa

SEQ ID NO: 381796 - DNA, 12 bp, Artificial Sequence
  Oligonucleotide primer for the detection of SNP TSC0064554
aaaaagaaataa

SEQ ID NO: 381797 - DNA, 12 bp, Artificial Sequence
  Oligonucleotide primer for the detection of SNP TSC0064555
tttatctattac

SEQ ID NO: 381798 - DNA, 12 bp, Artificial Sequence
  Oligonucleotide primer for the detection of SNP TSC0064555
agtttattgaaa

SEQ ID NO: 381799 - DNA, 12 bp, Artificial Sequence
  Oligonucleotide primer for the detection of SNP TSC0064555
aatctattaaaa

SEQ ID NO: 381800 - DNA, 12 bp, Artificial Sequence
  Oligonucleotide primer for the detection of SNP TSC0064555
tttgtttgttat

SEQ ID NO: 381801 - DNA, 12 bp, Artificial Sequence
  Oligonucleotide primer for the detection of SNP TSC0064556
cacacaaaaacg

SEQ ID NO: 381802 - DNA, 12 bp, Artificial Sequence
  Oligonucleotide primer for the detection of SNP TSC0064556
gatatttatgta

SEQ ID NO: 381803 - DNA, 12 bp, Artificial Sequence
  Oligonucleotide primer for the detection of SNP TSC0064556
gatatttacgta

SEQ ID NO: 381804 - DNA, 12 bp, Artificial Sequence
  Oligonucleotide primer for the detection of SNP TSC0064556
acatttacgtaa

SEQ ID NO: 381805 - DNA, 12 bp, Artificial Sequence
  Oligonucleotide primer for the detection of SNP TSC0064557
catataaattac

SEQ ID NO: 381806 - DNA, 12 bp, Artificial Sequence
  Oligonucleotide primer for the detection of SNP TSC0064558
tacataaatatc

SEQ ID NO: 381807 - DNA, 12 bp, Artificial Sequence
  Oligonucleotide primer for the detection of SNP TSC0064558
tacgtaaatatc

SEQ ID NO: 381808 - DNA, 12 bp, Artificial Sequence
  Oligonucleotide primer for the detection of SNP TSC0064558
attttgttgttg

SEQ ID NO: 381809 - DNA, 12 bp, Artificial Sequence
  Oligonukleotid-Primer
attttactacta

SEQ ID NO: 381810 - DNA, 12 bp, Artificial Sequence
  Oligonucleotide primer for the detection of SNP TSC0064558
atgtaaatgttt

SEQ ID NO: 381811 - DNA, 12 bp, Artificial Sequence
  Oligonucleotide primer for the detection of SNP TSC0064558
acgtaaatgttt

SEQ ID NO: 381812 - DNA, 12 bp, Artificial Sequence
  Oligonucleotide primer for the detection of SNP TSC0064559
atataaaaatcc

SEQ ID NO: 381813 - DNA, 12 bp, Artificial Sequence
  Oligonukleotid-Primer
aaacttaactca

SEQ ID NO: 381814 - DNA, 12 bp, Artificial Sequence
  Oligonucleotide primer for the detection of SNP TSC0064561
aaacacatttca

SEQ ID NO: 381815 - DNA, 12 bp, Artificial Sequence
  Oligonucleotide primer for the detection of SNP TSC0064561
aaacgcatttca

SEQ ID NO: 381816 - DNA, 12 bp, Artificial Sequence
  Oligonucleotide primer for the detection of SNP TSC0064561
ccattaatatta

SEQ ID NO: 381817 - DNA, 12 bp, Artificial Sequence
  Oligonucleotide primer for the detection of SNP TSC0064561
agtgtattttat

SEQ ID NO: 381818 - DNA, 12 bp, Artificial Sequence
  Oligonucleotide primer for the detection of SNP TSC0064561
agcgtattttat

SEQ ID NO: 381819 - DNA, 12 bp, Artificial Sequence
  Oligonucleotide primer for the detection of SNP TSC0064563
agtagatgagtt

SEQ ID NO: 381820 - DNA, 12 bp, Artificial Sequence
  Oligonucleotide primer for the detection of SNP TSC0064563
ttgtaataaagt

SEQ ID NO: 381821 - DNA, 12 bp, Artificial Sequence
  Oligonucleotide primer for the detection of SNP TSC0064564
aatttatatcct

SEQ ID NO: 381822 - DNA, 12 bp, Artificial Sequence
  Oligonucleotide primer for the detection of SNP TSC0064564
tgtattggttta

SEQ ID NO: 381823 - DNA, 12 bp, Artificial Sequence
  Oligonucleotide primer for the detection of SNP TSC0064565
catttcatactc

SEQ ID NO: 381824 - DNA, 12 bp, Artificial Sequence
  Oligonucleotide primer for the detection of SNP TSC0064565
cgtttcatactc

SEQ ID NO: 381825 - DNA, 12 bp, Artificial Sequence
  Oligonucleotide primer for the detection of SNP TSC0064565
tatgtaaagtta

SEQ ID NO: 381826 - DNA, 12 bp, Artificial Sequence
  Oligonucleotide primer for the detection of SNP TSC0064566
aaatctcaaaat

SEQ ID NO: 381827 - DNA, 12 bp, Artificial Sequence
  Oligonucleotide primer for the detection of SNP TSC0064566
taatttagtaag

SEQ ID NO: 381828 - DNA, 12 bp, Artificial Sequence
  Oligonucleotide primer for the detection of SNP TSC0064569
tacataaatttt

SEQ ID NO: 381829 - DNA, 12 bp, Artificial Sequence
  Oligonucleotide primer for the detection of SNP TSC0064569
tttggtaaaata

SEQ ID NO: 381830 - DNA, 12 bp, Artificial Sequence
  Oligonucleotide primer for the detection of SNP TSC0064570
actaaaacataa

SEQ ID NO: 381831 - DNA, 12 bp, Artificial Sequence
  Oligonucleotide primer for the detection of SNP TSC0064570
actaaaacgtaa

SEQ ID NO: 381832 - DNA, 12 bp, Artificial Sequence
  Oligonucleotide primer for the detection of SNP TSC0064570
tttaatgtgatt

SEQ ID NO: 381833 - DNA, 12 bp, Artificial Sequence
  Oligonucleotide primer for the detection of SNP TSC0064570
tctaatataatc

SEQ ID NO: 381834 - DNA, 12 bp, Artificial Sequence
  Oligonucleotide primer for the detection of SNP TSC0064570
gttagaatgtgg

SEQ ID NO: 381835 - DNA, 12 bp, Artificial Sequence
  Oligonucleotide primer for the detection of SNP TSC0064570
gttagaacgtgg

SEQ ID NO: 381836 - DNA, 12 bp, Artificial Sequence
  Oligonucleotide primer for the detection of SNP TSC0064572
aaatctactatt

SEQ ID NO: 381837 - DNA, 12 bp, Artificial Sequence
  Oligonucleotide primer for the detection of SNP TSC0064572
attaaaataaag

SEQ ID NO: 381838 - DNA, 12 bp, Artificial Sequence
  Oligonucleotide primer for the detection of SNP TSC0064573
ccaaaacacatt

SEQ ID NO: 381839 - DNA, 12 bp, Artificial Sequence
  Oligonucleotide primer for the detection of SNP TSC0064573
aaagtagtttga

SEQ ID NO: 381840 - DNA, 12 bp, Artificial Sequence
  Oligonucleotide primer for the detection of SNP TSC0064573
ttagggtatatt

SEQ ID NO: 381841 - DNA, 12 bp, Artificial Sequence
  Oligonucleotide primer for the detection of SNP TSC0064574
tattaaccaatc

SEQ ID NO: 381842 - DNA, 12 bp, Artificial Sequence
  Oligonucleotide primer for the detection of SNP TSC0064574
tattaaccgatc

SEQ ID NO: 381843 - DNA, 12 bp, Artificial Sequence
  Oligonucleotide primer for the detection of SNP TSC0064574
taagaagattaa

SEQ ID NO: 381844 - DNA, 12 bp, Artificial Sequence
  Oligonucleotide primer for the detection of SNP TSC0064579
ttattaataaag

SEQ ID NO: 381845 - DNA, 12 bp, Artificial Sequence
  Oligonucleotide primer for the detection of SNP TSC0064580
aaaatttcatca

SEQ ID NO: 381846 - DNA, 12 bp, Artificial Sequence
  Oligonucleotide primer for the detection of SNP TSC0064580
ctttccttccaa

SEQ ID NO: 381847 - DNA, 12 bp, Artificial Sequence
  Oligonucleotide primer for the detection of SNP TSC0064580
tggaattttatt

SEQ ID NO: 381848 - DNA, 12 bp, Artificial Sequence
  Oligonucleotide primer for the detection of SNP TSC0064581
ctaacctataaa

SEQ ID NO: 381849 - DNA, 12 bp, Artificial Sequence
  Oligonucleotide primer for the detection of SNP TSC0064581
ccttaataccaa

SEQ ID NO: 381850 - DNA, 12 bp, Artificial Sequence
  Oligonucleotide primer for the detection of SNP TSC0064581
ttggtttatgag

SEQ ID NO: 381851 - DNA, 12 bp, Artificial Sequence
  Oligonucleotide primer for the detection of SNP TSC0064583
ctcttaattttt

SEQ ID NO: 381852 - DNA, 12 bp, Artificial Sequence
  Oligonucleotide primer for the detection of SNP TSC0064583
aaaaattaagag

SEQ ID NO: 381853 - DNA, 12 bp, Artificial Sequence
  Oligonucleotide primer for the detection of SNP TSC0064587
atatatggatgg

SEQ ID NO: 381854 - DNA, 12 bp, Artificial Sequence
  Oligonucleotide primer for the detection of SNP TSC0064589
ttcccacccaaa

SEQ ID NO: 381855 - DNA, 12 bp, Artificial Sequence
  Oligonucleotide primer for the detection of SNP TSC0064589
ttcccacccgaa

SEQ ID NO: 381856 - DNA, 12 bp, Artificial Sequence
  Oligonucleotide primer for the detection of SNP TSC0064589
ggtagatgattg

SEQ ID NO: 381857 - DNA, 12 bp, Artificial Sequence
  Oligonucleotide primer for the detection of SNP TSC0064589
ggtagacgattg

SEQ ID NO: 381858 - DNA, 12 bp, Artificial Sequence
  Oligonucleotide primer for the detection of SNP TSC0064589
aacaaacaatta

SEQ ID NO: 381859 - DNA, 12 bp, Artificial Sequence
  Oligonucleotide primer for the detection of SNP TSC0064589
aacaaacgatta

SEQ ID NO: 381860 - DNA, 12 bp, Artificial Sequence
  Oligonucleotide primer for the detection of SNP TSC0064589
ttttttatttga

SEQ ID NO: 381861 - DNA, 12 bp, Artificial Sequence
  Oligonucleotide primer for the detection of SNP TSC0064589
ttttttattcga

SEQ ID NO: 381862 - DNA, 12 bp, Artificial Sequence
  Oligonucleotide primer for the detection of SNP TSC0064591
  unsure (5): unknown base
tgtanaatttga

SEQ ID NO: 381863 - DNA, 12 bp, Artificial Sequence
  Oligonucleotide primer for the detection of SNP TSC0064597
aatattcactat

SEQ ID NO: 381864 - DNA, 12 bp, Artificial Sequence
  Oligonucleotide primer for the detection of SNP TSC0064597
tataaattatgt

SEQ ID NO: 381865 - DNA, 12 bp, Artificial Sequence
  Oligonucleotide primer for the detection of SNP TSC0064597
ttacaaaccata

SEQ ID NO: 381866 - DNA, 12 bp, Artificial Sequence
  Oligonucleotide primer for the detection of SNP TSC0064597
agtgtttattgt

SEQ ID NO: 381867 - DNA, 12 bp, Artificial Sequence
  Oligonucleotide primer for the detection of SNP TSC0064598
ttttaacatcat

SEQ ID NO: 381868 - DNA, 12 bp, Artificial Sequence
  Oligonucleotide primer for the detection of SNP TSC0064599
aaactcacactt

SEQ ID NO: 381869 - DNA, 12 bp, Artificial Sequence
  Oligonucleotide primer for the detection of SNP TSC0064599
gaatttatattt

SEQ ID NO: 381870 - DNA, 12 bp, Artificial Sequence
  Oligonucleotide primer for the detection of SNP TSC0064600
ctcctaatttat

SEQ ID NO: 381871 - DNA, 12 bp, Artificial Sequence
  Oligonucleotide primer for the detection of SNP TSC0064600
gagataatttag

SEQ ID NO: 381872 - DNA, 12 bp, Artificial Sequence
  Oligonucleotide primer for the detection of SNP TSC0064601
aacctatcttaa

SEQ ID NO: 381873 - DNA, 12 bp, Artificial Sequence
  Oligonucleotide primer for the detection of SNP TSC0064601
gtgtaaagtttt

SEQ ID NO: 381874 - DNA, 12 bp, Artificial Sequence
  Oligonucleotide primer for the detection of SNP TSC0064601
tacaaaactcta

SEQ ID NO: 381875 - DNA, 12 bp, Artificial Sequence
  Oligonucleotide primer for the detection of SNP TSC0064601
gaatttattttg

SEQ ID NO: 381876 - DNA, 12 bp, Artificial Sequence
  Oligonucleotide primer for the detection of SNP TSC0064602
ttaaaaatacct

SEQ ID NO: 381877 - DNA, 12 bp, Artificial Sequence
  Oligonucleotide primer for the detection of SNP TSC0064602
tatagaggaatt

SEQ ID NO: 381878 - DNA, 12 bp, Artificial Sequence
  Oligonucleotide primer for the detection of SNP TSC0064602
ttagaaatgttt

SEQ ID NO: 381879 - DNA, 12 bp, Artificial Sequence
  Oligonucleotide primer for the detection of SNP TSC0064603
taccaaaaaacc

SEQ ID NO: 381880 - DNA, 12 bp, Artificial Sequence
  Oligonucleotide primer for the detection of SNP TSC0064603
gttattgttgta

SEQ ID NO: 381881 - DNA, 12 bp, Artificial Sequence
  Oligonucleotide primer for the detection of SNP TSC0064604
tatacttactat

SEQ ID NO: 381882 - DNA, 12 bp, Artificial Sequence
  Oligonucleotide primer for the detection of SNP TSC0064604
ttagttgtatga

SEQ ID NO: 381883 - DNA, 12 bp, Artificial Sequence
  Oligonucleotide primer for the detection of SNP TSC0064606
aaaaataaccct

SEQ ID NO: 381884 - DNA, 12 bp, Artificial Sequence
  Oligonucleotide primer for the detection of SNP TSC0064606
tattgattttta

SEQ ID NO: 381885 - DNA, 12 bp, Artificial Sequence
  Oligonucleotide primer for the detection of SNP TSC0064607
aacataaatcaa

SEQ ID NO: 381886 - DNA, 12 bp, Artificial Sequence
  Oligonucleotide primer for the detection of SNP TSC0064607
ggagaaggaggt

SEQ ID NO: 381887 - DNA, 12 bp, Artificial Sequence
  Oligonucleotide primer for the detection of SNP TSC0064607
aatatgagttag

SEQ ID NO: 381888 - DNA, 12 bp, Artificial Sequence
  Oligonucleotide primer for the detection of SNP TSC0064610
ccccattaaaat

SEQ ID NO: 381889 - DNA, 12 bp, Artificial Sequence
  Oligonucleotide primer for the detection of SNP TSC0064610
aagatagaaaag

SEQ ID NO: 381890 - DNA, 12 bp, Artificial Sequence
  Oligonucleotide primer for the detection of SNP TSC0064610
ttttattggggt

SEQ ID NO: 381891 - DNA, 12 bp, Artificial Sequence
  Oligonucleotide primer for the detection of SNP TSC0064613
cttattacccta

SEQ ID NO: 381892 - DNA, 12 bp, Artificial Sequence
  Oligonucleotide primer for the detection of SNP TSC0064613
ggtatgtttgat

SEQ ID NO: 381893 - DNA, 12 bp, Artificial Sequence
  Oligonucleotide primer for the detection of SNP TSC0064613
acatacttaata

SEQ ID NO: 381894 - DNA, 12 bp, Artificial Sequence
  Oligonucleotide primer for the detection of SNP TSC0064614
attttggttata

SEQ ID NO: 381895 - DNA, 12 bp, Artificial Sequence
  Oligonucleotide primer for the detection of SNP TSC0064616
tcttctcacttt

SEQ ID NO: 381896 - DNA, 12 bp, Artificial Sequence
  Oligonucleotide primer for the detection of SNP TSC0064616
gaaaagttaagg

SEQ ID NO: 381897 - DNA, 12 bp, Artificial Sequence
  Oligonucleotide primer for the detection of SNP TSC0064617
ataaacatccaa

SEQ ID NO: 381898 - DNA, 12 bp, Artificial Sequence
  Oligonucleotide primer for the detection of SNP TSC0064618
aaaacaaccatc

SEQ ID NO: 381899 - DNA, 12 bp, Artificial Sequence
  Oligonucleotide primer for the detection of SNP TSC0064618
tcaaaaaacaaa

SEQ ID NO: 381900 - DNA, 12 bp, Artificial Sequence
  Oligonucleotide primer for the detection of SNP TSC0064618
gagataattatt

SEQ ID NO: 381901 - DNA, 12 bp, Artificial Sequence
  Oligonucleotide primer for the detection of SNP TSC0064619
tatttttcacat

SEQ ID NO: 381902 - DNA, 12 bp, Artificial Sequence
  Oligonucleotide primer for the detection of SNP TSC0064619
tatttttcacgt

SEQ ID NO: 381903 - DNA, 12 bp, Artificial Sequence
  Oligonucleotide primer for the detection of SNP TSC0064619
ttggaaatagtg

SEQ ID NO: 381904 - DNA, 12 bp, Artificial Sequence
  Oligonucleotide primer for the detection of SNP TSC0064620
ataatacttata

SEQ ID NO: 381905 - DNA, 12 bp, Artificial Sequence
  Oligonucleotide primer for the detection of SNP TSC0064620
aatatgaatgtt

SEQ ID NO: 381906 - DNA, 12 bp, Artificial Sequence
  Oligonucleotide primer for the detection of SNP TSC0064620
acataaatacta

SEQ ID NO: 381907 - DNA, 12 bp, Artificial Sequence
  Oligonucleotide primer for the detection of SNP TSC0064620
aataatatttgt

SEQ ID NO: 381908 - DNA, 12 bp, Artificial Sequence
  Oligonucleotide primer for the detection of SNP TSC0064621
ttaaactatcta

SEQ ID NO: 381909 - DNA, 12 bp, Artificial Sequence
  Oligonucleotide primer for the detection of SNP TSC0064621
accttcaataaa

SEQ ID NO: 381910 - DNA, 12 bp, Artificial Sequence
  Oligonucleotide primer for the detection of SNP TSC0064624
cataaaattact

SEQ ID NO: 381911 - DNA, 12 bp, Artificial Sequence
  Oligonucleotide primer for the detection of SNP TSC0064624
aaagttttatta

SEQ ID NO: 381912 - DNA, 12 bp, Artificial Sequence
  Oligonucleotide primer for the detection of SNP TSC0064632
tactttttcctt

SEQ ID NO: 381913 - DNA, 12 bp, Artificial Sequence
  Oligonucleotide primer for the detection of SNP TSC0064632
tattagaaagtg

SEQ ID NO: 381914 - DNA, 12 bp, Artificial Sequence
  Oligonucleotide primer for the detection of SNP TSC0064632
taccaaaaaata

SEQ ID NO: 381915 - DNA, 12 bp, Artificial Sequence
  Oligonucleotide primer for the detection of SNP TSC0064633
tttaaagtgttt

SEQ ID NO: 381916 - DNA, 12 bp, Artificial Sequence
  Oligonucleotide primer for the detection of SNP TSC0064633
ccaaaatatcta

SEQ ID NO: 381917 - DNA, 12 bp, Artificial Sequence
  Oligonucleotide primer for the detection of SNP TSC0064633
aagattaggttt

SEQ ID NO: 381918 - DNA, 12 bp, Artificial Sequence
  Oligonucleotide primer for the detection of SNP TSC0064634
cccactacaatt

SEQ ID NO: 381919 - DNA, 12 bp, Artificial Sequence
  Oligonucleotide primer for the detection of SNP TSC0064634
ttaaagtgttta

SEQ ID NO: 381920 - DNA, 12 bp, Artificial Sequence
  Oligonucleotide primer for the detection of SNP TSC0064636
acaacctcctat

SEQ ID NO: 381921 - DNA, 12 bp, Artificial Sequence
  Oligonucleotide primer for the detection of SNP TSC0064636
ttggatgtgtaa

SEQ ID NO: 381922 - DNA, 12 bp, Artificial Sequence
  Oligonucleotide primer for the detection of SNP TSC0064637
acaaaatcatca

SEQ ID NO: 381923 - DNA, 12 bp, Artificial Sequence
  Oligonucleotide primer for the detection of SNP TSC0064637
agtttatatatt

SEQ ID NO: 381924 - DNA, 12 bp, Artificial Sequence
  Oligonucleotide primer for the detection of SNP TSC0064637
aacccacacact

SEQ ID NO: 381925 - DNA, 12 bp, Artificial Sequence
  Oligonucleotide primer for the detection of SNP TSC0064637
gtaaagttatta

SEQ ID NO: 381926 - DNA, 12 bp, Artificial Sequence
  Oligonucleotide primer for the detection of SNP TSC0064638
ctctttacattt

SEQ ID NO: 381927 - DNA, 12 bp, Artificial Sequence
  Oligonucleotide primer for the detection of SNP TSC0064638
aaggattatgaa

SEQ ID NO: 381928 - DNA, 12 bp, Artificial Sequence
  Oligonucleotide primer for the detection of SNP TSC0064639
gtaagaaataaa

SEQ ID NO: 381929 - DNA, 12 bp, Artificial Sequence
  Oligonucleotide primer for the detection of SNP TSC0064639
atgagtaatgaa

SEQ ID NO: 381930 - DNA, 12 bp, Artificial Sequence
  Oligonucleotide primer for the detection of SNP TSC0064643
aaacatccataa

SEQ ID NO: 381931 - DNA, 12 bp, Artificial Sequence
  Oligonucleotide primer for the detection of SNP TSC0064643
gggtgattttga

SEQ ID NO: 381932 - DNA, 12 bp, Artificial Sequence
  Oligonucleotide primer for the detection of SNP TSC0064643
aaataatcctaa

SEQ ID NO: 381933 - DNA, 12 bp, Artificial Sequence
  Oligonucleotide primer for the detection of SNP TSC0064643
atatttatgatt

SEQ ID NO: 381934 - DNA, 12 bp, Artificial Sequence
  Oligonucleotide primer for the detection of SNP TSC0064645
cctccttccttc

SEQ ID NO: 381935 - DNA, 12 bp, Artificial Sequence
  Oligonucleotide primer for the detection of SNP TSC0064645
ataaaaagaaag

SEQ ID NO: 381936 - DNA, 12 bp, Artificial Sequence
  Oligonucleotide primer for the detection of SNP TSC0064648
attggtattata

SEQ ID NO: 381937 - DNA, 12 bp, Artificial Sequence
  Oligonucleotide primer for the detection of SNP TSC0064648
ctaatatcataa

SEQ ID NO: 381938 - DNA, 12 bp, Artificial Sequence
  Oligonucleotide primer for the detection of SNP TSC0064648
aaagggaaattt

SEQ ID NO: 381939 - DNA, 12 bp, Artificial Sequence
  Oligonucleotide primer for the detection of SNP TSC0064649
actattaaacaa

SEQ ID NO: 381940 - DNA, 12 bp, Artificial Sequence
  Oligonucleotide primer for the detection of SNP TSC0064649
gaataggttatt

SEQ ID NO: 381941 - DNA, 12 bp, Artificial Sequence
  Oligonucleotide primer for the detection of SNP TSC0064649
aaataaactatc

SEQ ID NO: 381942 - DNA, 12 bp, Artificial Sequence
  Oligonucleotide primer for the detection of SNP TSC0064649
ttattgggtaat

SEQ ID NO: 381943 - DNA, 12 bp, Artificial Sequence
  Oligonucleotide primer for the detection of SNP TSC0064649
ttattgggtaac

SEQ ID NO: 381944 - DNA, 12 bp, Artificial Sequence
  Oligonucleotide primer for the detection of SNP TSC0064650
acatctacaacc

SEQ ID NO: 381945 - DNA, 12 bp, Artificial Sequence
  Oligonucleotide primer for the detection of SNP TSC0064650
tgttgaaaatta

SEQ ID NO: 381946 - DNA, 12 bp, Artificial Sequence
  Oligonucleotide primer for the detection of SNP TSC0064651
ataataaatggt

SEQ ID NO: 381947 - DNA, 12 bp, Artificial Sequence
  Oligonucleotide primer for the detection of SNP TSC0005600
ccatttttcatt

SEQ ID NO: 381948 - DNA, 12 bp, Artificial Sequence
  Oligonucleotide primer for the detection of SNP TSC0005600
ccgtttttcatt

SEQ ID NO: 381949 - DNA, 12 bp, Artificial Sequence
  Oligonucleotide primer for the detection of SNP TSC0005600
tttttgtaatgt

SEQ ID NO: 381950 - DNA, 12 bp, Artificial Sequence
  Oligonucleotide primer for the detection of SNP TSC0005600
ttcctacaatac

SEQ ID NO: 381951 - DNA, 12 bp, Artificial Sequence
  Oligonucleotide primer for the detection of SNP TSC0064652
aacaataactct

SEQ ID NO: 381952 - DNA, 12 bp, Artificial Sequence
  Oligonucleotide primer for the detection of SNP TSC0064653
tacttaactacc

SEQ ID NO: 381953 - DNA, 12 bp, Artificial Sequence
  Oligonucleotide primer for the detection of SNP TSC0064653
tatttagtatgg

SEQ ID NO: 381954 - DNA, 12 bp, Artificial Sequence
  Oligonucleotide primer for the detection of SNP TSC0064653
cattcaacataa

SEQ ID NO: 381955 - DNA, 12 bp, Artificial Sequence
  Oligonucleotide primer for the detection of SNP TSC0064653
tgtttagttatt

SEQ ID NO: 381956 - DNA, 12 bp, Artificial Sequence
  Oligonucleotide primer for the detection of SNP TSC0004563
cattcatttatt

SEQ ID NO: 381957 - DNA, 12 bp, Artificial Sequence
  Oligonucleotide primer for the detection of SNP TSC0004563
gattaatatgta

SEQ ID NO: 381958 - DNA, 12 bp, Artificial Sequence
  Oligonucleotide primer for the detection of SNP TSC0004779
aataactacata

SEQ ID NO: 381959 - DNA, 12 bp, Artificial Sequence
  Oligonucleotide primer for the detection of SNP TSC0004779
cttttatctcta

SEQ ID NO: 381960 - DNA, 12 bp, Artificial Sequence
  Oligonucleotide primer for the detection of SNP TSC0004779
gataattgtatg

SEQ ID NO: 381961 - DNA, 12 bp, Artificial Sequence
  Oligonucleotide primer for the detection of SNP TSC0064654
taacttaacttt

SEQ ID NO: 381962 - DNA, 12 bp, Artificial Sequence
  Oligonucleotide primer for the detection of SNP TSC0064654
agaaaaagttta

SEQ ID NO: 381963 - DNA, 12 bp, Artificial Sequence
  Oligonucleotide primer for the detection of SNP TSC0007249
taaataatgtaa

SEQ ID NO: 381964 - DNA, 12 bp, Artificial Sequence
  Oligonucleotide primer for the detection of SNP TSC0064655
accgaatataat

SEQ ID NO: 381965 - DNA, 12 bp, Artificial Sequence
  Oligonucleotide primer for the detection of SNP TSC0064655
ttagaggtatag

SEQ ID NO: 381966 - DNA, 12 bp, Artificial Sequence
  Oligonucleotide primer for the detection of SNP TSC0064656
cctcaccccccc

SEQ ID NO: 381967 - DNA, 12 bp, Artificial Sequence
  Oligonucleotide primer for the detection of SNP TSC0064657
ttgggtattgtg

SEQ ID NO: 381968 - DNA, 12 bp, Artificial Sequence
  Oligonucleotide primer for the detection of SNP TSC0064657
ttgggtatcgtg

SEQ ID NO: 381969 - DNA, 12 bp, Artificial Sequence
  Oligonucleotide primer for the detection of SNP TSC0009384
acttccctcacc

SEQ ID NO: 381970 - DNA, 12 bp, Artificial Sequence
  Oligonucleotide primer for the detection of SNP TSC0009384
acttccctcgcc

SEQ ID NO: 381971 - DNA, 12 bp, Artificial Sequence
  Oligonucleotide primer for the detection of SNP TSC0009384
atgatgtagggg

SEQ ID NO: 381972 - DNA, 12 bp, Artificial Sequence
  Oligonucleotide primer for the detection of SNP TSC0064658
taaatacaacct

SEQ ID NO: 381973 - DNA, 12 bp, Artificial Sequence
  Oligonucleotide primer for the detection of SNP TSC0064658
tattattttaaa

SEQ ID NO: 381974 - DNA, 12 bp, Artificial Sequence
  Oligonucleotide primer for the detection of SNP TSC0064660
ttaaccccaaac

SEQ ID NO: 381975 - DNA, 12 bp, Artificial Sequence
  Oligonucleotide primer for the detection of SNP TSC0064660
ttttggagttag

SEQ ID NO: 381976 - DNA, 12 bp, Artificial Sequence
  Oligonucleotide primer for the detection of SNP TSC0064660
tgattttaggtt

SEQ ID NO: 381977 - DNA, 12 bp, Artificial Sequence
  Oligonucleotide primer for the detection of SNP TSC0064661
atcaaatttact

SEQ ID NO: 381978 - DNA, 12 bp, Artificial Sequence
  Oligonucleotide primer for the detection of SNP TSC0064662
ttttgttaggat

SEQ ID NO: 381979 - DNA, 12 bp, Artificial Sequence
  Oligonucleotide primer for the detection of SNP TSC0064662
gataataagtat

SEQ ID NO: 381980 - DNA, 12 bp, Artificial Sequence
  Oligonucleotide primer for the detection of SNP TSC0064662
gataataagtac

SEQ ID NO: 381981 - DNA, 12 bp, Artificial Sequence
  Oligonucleotide primer for the detection of SNP TSC0007156
atcttattacaa

SEQ ID NO: 381982 - DNA, 12 bp, Artificial Sequence
  Oligonucleotide primer for the detection of SNP TSC0007156
tggttttttttg

SEQ ID NO: 381983 - DNA, 12 bp, Artificial Sequence
  Oligonucleotide primer for the detection of SNP TSC0007156
aatttcccctaa

SEQ ID NO: 381984 - DNA, 12 bp, Artificial Sequence
  Oligonucleotide primer for the detection of SNP TSC0064668
tcaccaaacacc

SEQ ID NO: 381985 - DNA, 12 bp, Artificial Sequence
  Oligonucleotide primer for the detection of SNP TSC0064668
gtggaaagaggt

SEQ ID NO: 381986 - DNA, 12 bp, Artificial Sequence
  Oligonucleotide primer for the detection of SNP TSC0064668
gtggaaagaggc

SEQ ID NO: 381987 - DNA, 12 bp, Artificial Sequence
  Oligonucleotide primer for the detection of SNP TSC0064668
ttattagatatt

SEQ ID NO: 381988 - DNA, 12 bp, Artificial Sequence
  Oligonucleotide primer for the detection of SNP TSC0064669
aaggtagtttta

SEQ ID NO: 381989 - DNA, 12 bp, Artificial Sequence
  Oligonucleotide primer for the detection of SNP TSC0064670
tcccatataact

SEQ ID NO: 381990 - DNA, 12 bp, Artificial Sequence
  Oligonucleotide primer for the detection of SNP TSC0064671
aataacactatt

SEQ ID NO: 381991 - DNA, 12 bp, Artificial Sequence
  Oligonucleotide primer for the detection of SNP TSC0064672
ttcttactacac

SEQ ID NO: 381992 - DNA, 12 bp, Artificial Sequence
  Oligonucleotide primer for the detection of SNP TSC0064672
agttgtttgtat

SEQ ID NO: 381993 - DNA, 12 bp, Artificial Sequence
  Oligonucleotide primer for the detection of SNP TSC0064672
taattatttaca

SEQ ID NO: 381994 - DNA, 12 bp, Artificial Sequence
  Oligonucleotide primer for the detection of SNP TSC0064672
ttttattgtatt

SEQ ID NO: 381995 - DNA, 12 bp, Artificial Sequence
  Oligonucleotide primer for the detection of SNP TSC0064673
caccaacctaac

SEQ ID NO: 381996 - DNA, 12 bp, Artificial Sequence
  Oligonucleotide primer for the detection of SNP TSC0064673
agttttgtttcg

SEQ ID NO: 381997 - DNA, 12 bp, Artificial Sequence
  Oligonucleotide primer for the detection of SNP TSC0064673
aatcttacccca

SEQ ID NO: 381998 - DNA, 12 bp, Artificial Sequence
  Oligonucleotide primer for the detection of SNP TSC0064673
aatcttaccccg

SEQ ID NO: 381999 - DNA, 12 bp, Artificial Sequence
  Oligonucleotide primer for the detection of SNP TSC0064673
tattagtttggt

SEQ ID NO: 382000 - DNA, 12 bp, Artificial Sequence
  Oligonucleotide primer for the detection of SNP TSC0064675
tgagaatattat

SEQ ID NO: 382001 - DNA, 12 bp, Artificial Sequence
  Oligonucleotide primer for the detection of SNP TSC0064675
tgagaatattac

SEQ ID NO: 382002 - DNA, 12 bp, Artificial Sequence
  Oligonucleotide primer for the detection of SNP TSC0064675
agagaagttaga

SEQ ID NO: 382003 - DNA, 12 bp, Artificial Sequence
  Oligonucleotide primer for the detection of SNP TSC0064676
acaccacactac

SEQ ID NO: 382004 - DNA, 12 bp, Artificial Sequence
  Oligonucleotide primer for the detection of SNP TSC0064676
ctcttatctaac

SEQ ID NO: 382005 - DNA, 12 bp, Artificial Sequence
  Oligonucleotide primer for the detection of SNP TSC0009338
acttaaaatttc

SEQ ID NO: 382006 - DNA, 12 bp, Artificial Sequence
  Oligonucleotide primer for the detection of SNP TSC0009338
agtaggttaata

SEQ ID NO: 382007 - DNA, 12 bp, Artificial Sequence
  Oligonucleotide primer for the detection of SNP TSC0009339
tatattaaccta

SEQ ID NO: 382008 - DNA, 12 bp, Artificial Sequence
  Oligonucleotide primer for the detection of SNP TSC0009339
aacacaaaaccc

SEQ ID NO: 382009 - DNA, 12 bp, Artificial Sequence
  Oligonucleotide primer for the detection of SNP TSC0009339
tatgttggttta

SEQ ID NO: 382010 - DNA, 12 bp, Artificial Sequence
  Oligonucleotide primer for the detection of SNP TSC0009340
actctccacata

SEQ ID NO: 382011 - DNA, 12 bp, Artificial Sequence
  Oligonucleotide primer for the detection of SNP TSC0009340
tagtaggttatt

SEQ ID NO: 382012 - DNA, 12 bp, Artificial Sequence
  Oligonucleotide primer for the detection of SNP TSC0009340
taacaaaccact

SEQ ID NO: 382013 - DNA, 12 bp, Artificial Sequence
  Oligonucleotide primer for the detection of SNP TSC0064677
ttggttttggag

SEQ ID NO: 382014 - DNA, 12 bp, Artificial Sequence
  Oligonucleotide primer for the detection of SNP TSC0064677
ctaaccctaaaa

SEQ ID NO: 382015 - DNA, 12 bp, Artificial Sequence
  Oligonucleotide primer for the detection of SNP TSC0064677
ggttaagggtat

SEQ ID NO: 382016 - DNA, 12 bp, Artificial Sequence
  Oligonucleotide primer for the detection of SNP TSC0064678
atattctaaatt

SEQ ID NO: 382017 - DNA, 12 bp, Artificial Sequence
  Oligonucleotide primer for the detection of SNP TSC0064678
tttattgtatga

SEQ ID NO: 382018 - DNA, 12 bp, Artificial Sequence
  Oligonukleotid-Primer
tttatcgtatga

SEQ ID NO: 382019 - DNA, 12 bp, Artificial Sequence
  Oligonucleotide primer for the detection of SNP TSC0064678
tttattgtacga

SEQ ID NO: 382020 - DNA, 12 bp, Artificial Sequence
  Oligonucleotide primer for the detection of SNP TSC0064678
tttatcgtacga

SEQ ID NO: 382021 - DNA, 12 bp, Artificial Sequence
  Oligonucleotide primer for the detection of SNP TSC0064678
cccatcacacaa

SEQ ID NO: 382022 - DNA, 12 bp, Artificial Sequence
  Oligonucleotide primer for the detection of SNP TSC0064678
cccatcacacga

SEQ ID NO: 382023 - DNA, 12 bp, Artificial Sequence
  Oligonucleotide primer for the detection of SNP TSC0064678
cccatcgcacaa

SEQ ID NO: 382024 - DNA, 12 bp, Artificial Sequence
  Oligonucleotide primer for the detection of SNP TSC0064678
cccatcgcacga

SEQ ID NO: 382025 - DNA, 12 bp, Artificial Sequence
  Oligonucleotide primer for the detection of SNP TSC0064678
atgttttaaatt

SEQ ID NO: 382026 - DNA, 12 bp, Artificial Sequence
  Oligonucleotide primer for the detection of SNP TSC0064679
taaacctctctc

SEQ ID NO: 382027 - DNA, 12 bp, Artificial Sequence
  Oligonucleotide primer for the detection of SNP TSC0064679
tatctcatctca

SEQ ID NO: 382028 - DNA, 12 bp, Artificial Sequence
  Oligonucleotide primer for the detection of SNP TSC0064680
aattaatacaaa

SEQ ID NO: 382029 - DNA, 12 bp, Artificial Sequence
  Oligonucleotide primer for the detection of SNP TSC0064680
atcttttcataa

SEQ ID NO: 382030 - DNA, 12 bp, Artificial Sequence
  Oligonucleotide primer for the detection of SNP TSC0064680
attaatatagat

SEQ ID NO: 382031 - DNA, 12 bp, Artificial Sequence
  Oligonucleotide primer for the detection of SNP TSC0064682
atacaataacac

SEQ ID NO: 382032 - DNA, 12 bp, Artificial Sequence
  Oligonucleotide primer for the detection of SNP TSC0064683
tatcataatacc

SEQ ID NO: 382033 - DNA, 12 bp, Artificial Sequence
  Oligonucleotide primer for the detection of SNP TSC0064683
attatatattaa

SEQ ID NO: 382034 - DNA, 12 bp, Artificial Sequence
  Oligonucleotide primer for the detection of SNP TSC0064686
ataatatcttca

SEQ ID NO: 382035 - DNA, 12 bp, Artificial Sequence
  Oligonucleotide primer for the detection of SNP TSC0064686
gaagaaataaat

SEQ ID NO: 382036 - DNA, 12 bp, Artificial Sequence
  Oligonucleotide primer for the detection of SNP TSC0064688
attactataatc

SEQ ID NO: 382037 - DNA, 12 bp, Artificial Sequence
  Oligonucleotide primer for the detection of SNP TSC0064688
aattgtgattta

SEQ ID NO: 382038 - DNA, 12 bp, Artificial Sequence
  Oligonucleotide primer for the detection of SNP TSC0064689
gtgtttaatatt

SEQ ID NO: 382039 - DNA, 12 bp, Artificial Sequence
  Oligonucleotide primer for the detection of SNP TSC0064689
atacccaacacc

SEQ ID NO: 382040 - DNA, 12 bp, Artificial Sequence
  Oligonucleotide primer for the detection of SNP TSC0064690
aatagaattttg

SEQ ID NO: 382041 - DNA, 12 bp, Artificial Sequence
  Oligonucleotide primer for the detection of SNP TSC0064691
tcaaaaattcac

SEQ ID NO: 382042 - DNA, 12 bp, Artificial Sequence
  Oligonucleotide primer for the detection of SNP TSC0064692
gttgtttggtaa

SEQ ID NO: 382043 - DNA, 12 bp, Artificial Sequence
  Oligonucleotide primer for the detection of SNP TSC0006675
catatttcccaa

SEQ ID NO: 382044 - DNA, 12 bp, Artificial Sequence
  Oligonucleotide primer for the detection of SNP TSC0006675
taatttcaatct

SEQ ID NO: 382045 - DNA, 12 bp, Artificial Sequence
  Oligonucleotide primer for the detection of SNP TSC0064693
ctaatactaaac

SEQ ID NO: 382046 - DNA, 12 bp, Artificial Sequence
  Oligonucleotide primer for the detection of SNP TSC0064693
ttttacaattta
